(19) United States
(12) Patent Application Publication
(10) Pub. No.: US 2017/0152573 A1
(43) Pub. Date: Jun. 1, 2017

(54) SINGLE-STRANDED OLIGONUCLEOTIDE PROBES FOR CHROMOSOME OR GENE COPY ENUMERATION

(71) Applicant: Ventana Medical Systems, Inc., Tucson, AZ (US)

(72) Inventors: Leslie Baca Parkinson, Tucson, AZ (US); Antony Hubbard, Tucson, AZ (US); Lei Tang, Oro Valley, AZ (US); Wenjun Zhang, Tucson, AZ (US)

(21) Appl. No.: 15/425,810

(22) Filed: Feb. 6, 2017

Related U.S. Application Data
(63) Continuation of application No. PCT/EP2015/068041, filed on Aug. 5, 2015.
(60) Provisional application No. 62/034,035, filed on Aug. 6, 2014.

(51) Int. Cl. C12Q 1/68

(52) U.S. Cl. CPC C12Q 1/6886; C12Q 2600/158; C12Q 2600/156

(57) ABSTRACT

Single-stranded oligonucleotide probes, systems, kits and methods for chromosome enumeration, gene copy enumeration, or tissue diagnostics. The probes are particularly suited for detecting gene amplification, deletion, or rearrangement in tissue samples in a single, dual, or multiplexed assay. The probes exhibit improved performance compared to industry leading dual-stranded probes; particularly in terms of the rate of hybridization and the ability to achieve specific hybridization without blocking DNA.

### CROSS-REFERENCE TO RELATED APPLICATIONS

[0001] This application is a continuation of International Patent Application No. PCT/EP2015/068041 filed Aug. 5, 2015, which claims priority to and the benefit of U.S. Provisional Patent Application No. 62/034,035, filed Aug. 6, 2014. Each of the above patent applications is incorporated herein by reference as if set forth in its entirety.

### SEQUENCE LISTING

[0002] The instant application contains a Sequence Listing which has been submitted electronically in ASCII format and is hereby incorporated by reference in its entirety. Said ASCII copy, created on Feb. 6, 2017, is named 32190_Project1_ST25.txt and is 1,291,542 bytes in size.

### FIELD

[0003] This disclosure relates to oligonucleotide probes, systems, kits, and methods for using said probes and systems for chromosome enumeration, for detection of nucleic acid target sequences (e.g., genomic DNA or RNA), for gene copy number enumeration, and/or for tissue diagnostics.

### BACKGROUND

[0004] Probes have been developed for a variety of diagnostic and research purposes. Hybridization of chromosome or gene-specific probes has made possible detection of chromosomal abnormalities associated with numerous diseases and syndromes, including constitutive genetic anomalies, such as microdeletion syndromes, chromosome translocations, gene amplification and aneuploidy syndromes, neoplastic diseases, as well as pathogen infections. Detection of genetic changes in these regions can provide diagnostic and prognostic information for patients and in some cases, inform treatment decisions.

[0005] However, existing probes for detection and enumeration of human chromosome 3 (CHR3) require long assay times and are not desirable. For example, chromosome 3 probes are typically generated from plasmid pHS05, which targets chromosome 3 alpha satellite sequences, or from BACs for a site-specific region (Yurov, Mitkevich et al. 1987; Woenckhaus, Steger et al. 2007; Agell, Hernandez et al. 2011; Jang, Yonescu et al. 2006; De Marco, Rinaldo et al. 2013; Nakayama et al. 2006). Unfortunately, these double-stranded probes have repetitive sequences that are common to centromere regions of other human chromosome. As such, blocking DNA is used in conjunction with these probes to help reduce non-specific binding. Further, assays employing these probes require extensive hybridization time to achieve sufficient hybridization, e.g., about 12 to 18 hours.

[0006] The use of single strand probes has a distinct advantage over the use of double probes. Single-stranded probes generally have higher sensitivity than double-stranded probes because a proportion of the denatured double-stranded probe renatures to form probe homoduplexes, thus preventing their capture of genomic targets in the test samples [Taneja K and Singer R H. (1987), Lewis M E, Sherman T G, Watson S J. (1985); Strachan T, Read A P. (1999); Kourilsky P, Mercereau O, Gros D, Tremblay G. (1974)]. Several laboratories have reported that single-stranded probes provide higher sensitivity on hybridization than double-stranded probes (An S F, Franklin D, Fleming K A. (1992); Hannon K, Johnstone E, Craft L S, et al (1993); Cox K H, DeLeon D V, Angerer L M, Angerer R C. (1984).

[0007] Despite the appeal of the use of a single strand probe in the detection and enumeration of human chromosome 3, the general consensus by workers in this field is that it is not possible to make single strand probes that are specific enough to chromosome 3. The major concern is the off-target hits of a short single strand probe to other chromosome targets. Another concern is the robustness of a small number of short single strand probes. It was found that human chromosome 3-specific alpha satellite contained a ˜2,900 base pair repeat unit that consists of 17 monomers (Alexandrov, I. A., et al. (1993). Each individual may carry different combinations of these 17 monomers and their related variants. A limited number of short single strand probes (e.g., 2-5) may not be robust enough to detect chromosome 3 polymorphism in populations (Yurov, Y. B., et al. 1987). As such, prior to the present invention, probes for detection and enumeration of human chromosome 3 are not desirable and not time efficient.

[0008] Lung cancer is the leading cause of cancer-related mortality worldwide, with an estimate of 1.4 million deaths in 2010. In the United States, more than 220,000 new cases and more than 157,000 deaths annually with lung cancer, non-small cell lung cancer (NSCLC) accounts for 85% of all lung cancers. Adenocarcinoma and squamous-cell carcinoma (SCC) are the most frequent histological subtypes accounting for 50% and 30% of NSCLC cases respectively (Minna, Roth et al. 2002). Historically, approaches to the treatment of NSCLC were uniform, and histologic subtypes within NSCLC did not significantly affect treatment decisions. In the past ten years, knowledge of genetic aberrances of lung adenocarcinoma has been identified in most cases of lung adenocarcinoma; targeted drugs like EGFR tyrosine kinase inhibitors and ALK inhibitors are now applied to about one third of the patients (Zochbauer-Muller, Gazdar et al. 2002, Cooper, Lam et al. 2013, Villaruz, Burns et al. 2013). Unlike adenocarcinoma of the lung, SCC remains a relatively poorly understood disease that lacks a consensus molecular profile, although recent work is overcoming these challenges (Ji, Guan et al. 2011, Lockwood, Wilson et al. 2012). Gain of chromosome 3q25-qter was revealed almost exclusively in SCC, among them the PIK3CA which encodes the catalytic alpha subunit (p110α) of phosphatidylinositol (PI) 3-kinase (PI3K) (Kok, Geering et al. 2009, Massion, Kuo et al. 2002, Okudela, Suzuki et al. 2007). Moreover, PIK3CA was found to be amplified in up to 45% of SCC cancer patients (Yamamoto, Shigematsu et al. 2008, Spoerke, O'Brien et al. 2012). A strong correlation was found between PIK3CA amplification and the increased PI3K pathway activity such as cell proliferation, survival, oncogenic RAS signaling and transformation (Woenckhaus, Steger et al. 2002). These features make PI3K an attractive target for therapeutic intervention on SCC of the lung (Wee, Lengauer et al. 2008).

[0009] Currently, several inhibitors directed against PI3K are being clinically evaluated for NSCLC treatment, where distinct candidate predictive biomarkers strategies might be needed for SCC patient populations (Salphati, Belvin et al. 2009, Blumenthal, Orbach et al. 2011, Salphati, Pang et al. 2011). In a recent study by Spoerke J M et al. (Spoerke, O'Brien et al. 2012), PIK3CA amplification was detected with fluorescent in situ hybridization (FISH) in 37% of SCC and only 5% of adenocarcinomas. Cell lines harboring PI3K amplification were exquisitely sensitive to the PI3K inhibitor GDC-0941. In addition, Angulo B et al. (Angulo, Suarez-Gauthier et al. 2008) demonstrated a strong statistically significant association between increased levels of PIK3CA mRNA expression and gene amplification predominantly in SCC. On the protein level, Scrima M et al. (Scrima, De Marco et al. 2012) showed the majority of NSCLCs with increased copy number of PIK3CA showed moderate or high expression of p110α.

[0010] Currently, all studies on PIK3CA copy number gain employ fluorescent in situ hybridization (FISH) technology. These PIK3CA FISH probes are derived from bacterial artificial chromosomes (BACs) that cover PIK3CA gene region; while most CHR3 probes are generated from plasmid pHS05 that targets chromosome 3 alpha satellite sequences or BACs for site-specific region. These double stranded probes require 12 to 18 hours hybridization in order to achieve sufficient hybridization; and require blocking DNA due to the presence of repetitive sequence common to other centromere regions which would result in non-specific binding without the addition of the blocking DNA.

### SUMMARY

[0011] The present inventors have surprisingly discovered a set of 18 unique single strand probes that are highly specific for chromosome 3. In fact, these newly discovered oligonucleotide probes are so highly specific that the use of blocking DNA can be eliminated in the assays. Furthermore, it was surprisingly discovered that these oligonucleotide probes have much enhanced hybridization kinetics that they require a significantly reduced hybridization time.

[0012] Also surprisingly, these single-stranded oligonucleotide probes to chromosome 3 resulted in discrete enumerable rounded signals. This is in contrast to the nick-translation labeled double-stranded probe, which generate signals with a wide range of size and shape.

[0013] The single-stranded oligonucleotide probes to chromosome 3 of the present invention may be used in combination with one or more target probes directed to a target gene of interest. This allows for gene copy enumeration (e.g., determination of the ratio of a target gene to its corresponding chromosome), which may be important for tissue diagnostics. As an example, PIK3CA is a gene found on chromosome 3. Commercial products and research reagents for PIK3CA gene copy number use bacterial artificial chromosomes (BACs) that cover the PIK3CA gene region (Angulo, Suarez-Gauthier et al. 2008); Shayesteh, Lu et al, 1999; Psyrri, Papageorgiou et al 2009). The BACs are double-stranded DNA probes, which require about 12 to 18 hours hybridization time.

[0014] The present invention also features the use of single-stranded oligonucleotide probes to detect (and enumerate gene copy number) the PIK3CA gene on chromosome 3 in combination with chromosome 3 detection and enumeration using the aforementioned single-stranded oligonucleotide probes. This is the first and only demonstration of gene copy number enumeration using single-stranded oligonucleotide probes for both the gene and chromosome targets.

[0015] In illustrative embodiments, systems for in situ hybridization may comprise a control probe specific to a control region of a chromosome, e.g., chromosome 3. The control probe is configured to hybridize to formalin fixed paraffin embedded (FFPE) tissue in about 3 hours or less, e.g., 1 hour or less. In some embodiments, the control probe is a plurality of synthetic single-stranded oligonucleotides. The system may also feature a target probe specific to a target region of the chromosome, wherein the target probe is also configured to hybridize in about a about 3 hours or less, e.g., 1 hour or less. In some embodiments, the control region is a centromere. The target region may be a gene or gene locus.

[0016] In illustrative embodiments, systems for in situ hybridization may comprise a control probe specific to a control region of chromosome 3, the control probe is labeled with at least one first label, the control probe is configured to achieve a staining intensity of ≧2 and staining coverage of ≧50% of the number of total nuclei of a control sample within 3 hours of hybridization.

[0017] In some embodiments, the systems may feature a target probe specific to a target region of chromosome 3, the target probe is labeled with at least one label, the target probe is configured to achieve a staining intensity of ≧2 and staining coverage of ≧50% of the number of total nuclei of a target sample within 3 hours of hybridization.

[0018] In other illustrative embodiments, methods for in situ hybridization of a tissue sample may comprise contacting the tissue sample with a control probe, hybridizing the control probe to the control region under conditions for a period of time less than about 3 hours, rinsing the sample to remove unbound probe, and detecting presence of the hybridized probe. The control may comprise a plurality of single-stranded labeled synthetic oligonucleotides. In one embodiment, the method further comprises applying chromogenic detection reagents that recognize labels and amplify the signal associated with the probes. In further embodiments, methods using and kits pertaining to the aforementioned systems are disclosed.

[0019] In some illustrative embodiments, methods for obtaining two bright-field chromogenic in situ hybridization signals per cell may comprise contacting a tissue sample containing a plurality of cells with a control probe specific to a control region of a single chromosome, the probe selected so as to not evidently bind non-specifically in the absence of blocking DNA; hybridizing the control probe to the control region of said chromosome; rinsing the sample to remove unbound probe; and detecting the presence of the hybridized probe via a chromogenic reagent so as to generate two bright-field chromogenic in situ hybridization signals per cell.

[0020] Additional features of the present disclosure will become apparent to those skilled in the art upon consideration of the following detailed description of illustrative embodiments exemplifying the best mode of carrying out the disclosure as presently perceived.

### BRIEF DESCRIPTION OF THE DRAWINGS

[0021] The patent or application file contains at least one drawing executed in color. Copies of this patent or patent application publication with color drawing(s) will be provided by the Office upon request and payment of the necessary fee.

[0022] FIG. 1 is a schematic view of the 3q26.32 region of chromosome 3. The PIK3CA oligo probe covers the region between 178,922,283 and 179,682,019.

[0023] FIG. 2 shows PIK3CA and CHR3 DISH staining on metaphase spread chromosomes.

[0024] FIG. 3 shows PIK3CA and CHR3 DISH staining on Calu 3 cells.

[0025] FIG. 4 is a hybridization time course study.

[0026] FIG. 5 shows cross-reactive signals in a normal lung tissue stained with pHS05 plasmid (for chromosome 3) in the absence of human blocking DNA.

[0027] FIG. 6A is a photograph showing CHR3 staining with the pHS05 plasmid probe.

[0028] FIG. 6B is an additional photograph showing CHR3 staining with the pHS05 plasmid probe.

[0029] FIG. 6C is a photograph showing CHR3 staining with the probes of the present invention or with the pHS05 plasmid. Staining with probes of the present invention offers discrete CHR3 signals with generally uniform shape and size.

[0030] FIG. 6D is an additional photograph showing CHR3 staining with the probes of the present invention or with the pHS05 plasmid. Staining with probes of the present invention offers discrete CHR3 signals with generally uniform shape and size.

[0031] FIG. 7 shows that the PIK3CA/CHR3 ratio from the scores of 50 nuclei was consistent with the scores from the entire 100 nuclei enumeration when choosing 50 nuclei with the highest counts.

[0032] FIG. 8A is a graph illustrating the PIK3CA/CHR3 ratio profile on the tested tissue types of the 102 lung specimens.

[0033] FIG. 8B is a graph illustrating the average PIK3CA copy number profile on the tested tissue types of the 102 lung specimens.

[0034] FIG. 8C is a graph illustrating the average CHR3 copy number profiles on the tested tissue types of the 102 lung specimens.

[0035] FIG. 9 shows cases with PIK3CA copy number gain evaluated by PIK3CA/CHR3 ratio (>2) and average PIK3CA copy number (>4) per nuclei.

[0036] FIG. 10A illustrates p110α IHC on Calu-3 xenograft staining results on the 102 lung tissues.

[0037] FIG. 10B illustrates p110α IHC staining results on the 102 lung tissues.

[0038] FIG. 10C illustrates PIK3CA mRNA ISH (C) staining results on the 102 lung tissues.

[0039] FIG. 11A illustrates (i) PIK3CA/CHR3 DISH, (ii) PIK3CA mRNA ISH and (iii) p100α IHC staining on a SCC (F2) with gene copy gain, increased mRNA and protein expression levels.

[0040] FIG. 11B shows (i) PIK3CA/CHR3 DISH, (ii) PIK3CA mRNA ISH and (iii) p100α IHC staining on a SCC (F3). PIK3CA gene copy number is 2.16 with ratio 0.98, mRNA level is slightly elevated (H score 75), protein expression is normal (IHC intensity 1).

[0041] FIG. 11C shows (i) PIK3CA/CHR3 DISH, (ii) PIK3CA mRNA ISH and (iii) p100α IHC staining on a SCC (F5). PIK3CA gene copy number is 2.58 with ratio 1.04, mRNA level is within normal range (H score 65), but protein is overexpressed (IHC intensity 3, 50%).

[0042] FIG. 12 shows the distribution of the CHR3 signal radii and the statistical analysis of the data.

[0043] FIG. 13 shows the signals used for measurements (radii) in FIG. 12.

[0044] FIG. 14A shows examples of concentric circles (top) and simple closed curves (bottom) used for evaluating enumerable signals.

[0045] FIG. 14B shows additional examples of concentric circles (top) and simple closed curves (bottom) used for evaluating enumerable signals.

### SEQUENCES

[0046] The nucleic acid sequences provided herein are shown using standard letter abbreviations for nucleotide bases, as defined in 37 C.F.R. 1.822. Only one strand of each nucleic acid sequence is shown, but the complementary strand is understood as included by any reference to the displayed strand. In the provided sequences:

[0047] SEQ ID NOs: 1-18 are nucleic acid sequences of probes to human chromosome 3.

[0048] SEQ ID NOs: 19-1230 are nucleic acid sequences of probes to the human PIK3CA gene locus or nearby regions.

### DETAILED DESCRIPTION

[0049] The present inventors are not aware of any successful work thus far by anyone to improve the reliability and conditions for detection and enumeration of human chromosome 3 using pHS05 plasmid-derived chromosome 3 probe. In the inventors' hands, extensive studies have been performed on the pHS05 plasmid-derived chromosome 3 probe, trying to optimize target retrieval steps, stringency wash step, and chromogen development steps, but they were not able to achieve improved quality and reliability for these assays. Additionally, the present inventors have been unable to develop assay steps to reduce or eliminate the requirement to use blocking DNA in such assays. FIG. 5 shows the excessive background signals in a hybridization assay using the pHS05 plasmid CHR3 probe without the use of blocking DNA.

[0050] Additionally, overwhelming evidence exists that single stranded probes cannot be developed for the detection and enumeration of human chromosome 3. For example, as shown in Table 1, bioinformatics research revealed that the 80nt sequences derived from the pHS05 plasmid/chromosome 3 probe (the sequences of the centromere region of chromosome 3) had high homology to several other chromosomes (e.g., chromosome 5, 10, 12, 14, 16, 21, 22 etc.).

TABLE 1

| SEQ | | | | | | | | | | |
|---|---|---|---|---|---|---|---|---|---|---|
| ID NO | SCORE | START | END | QSIZE | IDENTITY | CHRO | STRAND | START | END | SPAN |
| 1 | 80 | 1 | 80 | 80 | 100.00% | 3 | + | 91978690 | 91978769 | 80 |
| 1 | 80 | 1 | 80 | 80 | 100.00% | 3 | + | 91918985 | 91919064 | 80 |
| 1 | 80 | 1 | 80 | 80 | 100.00% | 3 | + | 91906555 | 91906634 | 80 |
| 1 | 80 | 1 | 80 | 80 | 100.00% | 3 | + | 91883680 | 91883759 | 80 |
| 1 | 80 | 1 | 80 | 80 | 100.00% | 3 | + | 91855796 | 91855875 | 80 |
| 1 | 80 | 1 | 80 | 80 | 100.00% | 3 | + | 91830105 | 91830184 | 80 |
| 1 | 80 | 1 | 80 | 80 | 100.00% | 3 | + | 91798300 | 91798379 | 80 |
| 1 | 80 | 1 | 80 | 80 | 100.00% | 3 | + | 91749140 | 91749219 | 80 |
| 1 | 80 | 1 | 80 | 80 | 100.00% | 3 | + | 91743696 | 91743775 | 80 |
| 1 | 80 | 1 | 80 | 80 | 100.00% | 3 | + | 91729235 | 91729314 | 80 |
| 1 | 80 | 1 | 80 | 80 | 100.00% | 3 | + | 91688231 | 91688310 | 80 |
| 1 | 80 | 1 | 80 | 80 | 100.00% | 3 | + | 91685340 | 91685419 | 80 |
| 1 | 80 | 1 | 80 | 80 | 100.00% | 3 | + | 91659655 | 91659734 | 80 |
| 1 | 80 | 1 | 80 | 80 | 100.00% | 3 | + | 91623591 | 91623670 | 80 |
| 1 | 80 | 1 | 80 | 80 | 100.00% | 3 | + | 91606580 | 91606659 | 80 |
| 1 | 80 | 1 | 80 | 80 | 100.00% | 3 | + | 91572395 | 91572474 | 80 |
| 1 | 78 | 1 | 80 | 80 | 98.80% | 3 | − | 93712111 | 93712190 | 80 |
| 1 | 78 | 1 | 80 | 80 | 98.80% | 3 | − | 93709226 | 93709305 | 80 |
| 1 | 78 | 1 | 80 | 80 | 98.80% | 3 | − | 93706338 | 93706417 | 80 |
| 1 | 78 | 1 | 80 | 80 | 98.80% | 3 | − | 91549327 | 91549406 | 80 |
| 1 | 76 | 1 | 80 | 80 | 97.50% | 3 | − | 91543887 | 91543966 | 80 |
| 1 | 70 | 1 | 80 | 80 | 93.80% | 3 | − | 91546102 | 91546181 | 80 |
| 1 | 70 | 1 | 80 | 80 | 93.80% | 3 | − | 91548311 | 91548390 | 80 |
| 1 | 70 | 1 | 80 | 80 | 93.80% | 3 | − | 91552216 | 91552295 | 80 |
| 1 | 67 | 1 | 80 | 80 | 92.50% | 12 | − | 37253189 | 37266589 | 13401 |
| 1 | 64 | 1 | 80 | 80 | 90.00% | Un_KI270317v1 | − | 37199 | 37278 | 80 |
| 1 | 64 | 1 | 80 | 80 | 90.00% | 5 | − | 49631520 | 49631599 | 80 |
| 1 | 64 | 1 | 80 | 80 | 90.00% | 12 | − | 34715481 | 34715560 | 80 |
| 1 | 63 | 1 | 80 | 80 | 88.40% | 3 | − | 93707356 | 93707434 | 79 |
| 1 | 63 | 1 | 80 | 80 | 90.00% | 3 | − | 93710239 | 93715739 | 5501 |
| 1 | 63 | 1 | 80 | 80 | 90.00% | 12 | − | 37251774 | 37254004 | 2231 |
| 1 | 62 | 1 | 80 | 80 | 88.80% | 5 | − | 49623450 | 49623529 | 80 |
| 1 | 62 | 1 | 80 | 80 | 88.80% | 5 | − | 49625489 | 49625568 | 80 |
| 1 | 62 | 1 | 80 | 80 | 88.80% | 5 | − | 49630841 | 49630920 | 80 |
| 1 | 62 | 1 | 80 | 80 | 88.80% | 5 | − | 49644121 | 49644200 | 80 |
| 1 | 62 | 1 | 80 | 80 | 88.80% | 5 | − | 49617016 | 49617095 | 80 |
| 1 | 62 | 1 | 80 | 80 | 88.80% | 5 | − | 49614976 | 49615055 | 80 |
| 1 | 62 | 1 | 80 | 80 | 88.80% | 5 | − | 49610165 | 49610244 | 80 |
| 1 | 62 | 1 | 80 | 80 | 88.80% | 16 | − | 38267076 | 38267155 | 80 |
| 1 | 62 | 1 | 80 | 80 | 88.80% | 16 | − | 38275894 | 38275973 | 80 |
| 1 | 62 | 1 | 80 | 80 | 88.80% | 12 | − | 34715816 | 34715895 | 80 |
| 1 | 61 | 1 | 79 | 80 | 88.70% | 12 | − | 37260072 | 37260150 | 79 |
| 1 | 60 | 1 | 80 | 80 | 91.70% | Un_KI270411v1 | − | 383 | 2496 | 2114 |
| 1 | 60 | 1 | 80 | 80 | 87.50% | Un_KI270304v1 | − | 726 | 805 | 80 |
| 1 | 60 | 1 | 80 | 80 | 87.50% | Un_KI270304v1 | − | 1406 | 1485 | 80 |
| 1 | 60 | 1 | 80 | 80 | 87.50% | 5 | − | 49615656 | 49615735 | 80 |
| 1 | 60 | 1 | 80 | 80 | 87.50% | 5 | − | 49622095 | 49622174 | 80 |
| 1 | 60 | 1 | 80 | 80 | 87.50% | 3 | − | 91545424 | 91545503 | 80 |
| 1 | 60 | 1 | 80 | 80 | 87.50% | 3 | − | 91551539 | 91551618 | 80 |
| 1 | 60 | 1 | 80 | 80 | 91.70% | 12 | − | 34833986 | 34834121 | 136 |
| 1 | 60 | 1 | 80 | 80 | 87.50% | 10 | − | 41839614 | 41839693 | 80 |
| 1 | 60 | 1 | 80 | 80 | 87.50% | 10 | − | 41841816 | 41841895 | 80 |
| 1 | 58 | 1 | 80 | 80 | 86.30% | Un_KI270411v1 | − | 1060 | 1139 | 80 |
| 1 | 58 | 4 | 75 | 80 | 87.40% | 3 | − | 93706685 | 93706755 | 71 |
| 1 | 58 | 1 | 80 | 80 | 86.30% | 16 | − | 38267416 | 38267495 | 80 |
| 1 | 57 | 6 | 80 | 80 | 88.00% | 3 | − | 91542361 | 91542435 | 75 |
| 1 | 57 | 8 | 80 | 80 | 89.10% | 12 | − | 34835059 | 34835131 | 73 |
| 1 | 56 | 1 | 80 | 80 | 85.00% | 12 | − | 34833646 | 34833725 | 80 |
| 1 | 56 | 5 | 80 | 80 | 86.90% | 1 | − | 122462723 | 122462798 | 76 |
| 1 | 54 | 9 | 80 | 80 | 87.50% | 12 | − | 37237861 | 37237932 | 72 |
| 1 | 54 | 1 | 80 | 80 | 83.80% | 12 | − | 34821901 | 34821980 | 80 |
| 1 | 54 | 1 | 80 | 80 | 86.80% | 10 | − | 41841477 | 41841555 | 79 |
| 1 | 53 | 3 | 80 | 80 | 84.70% | 4 | − | 67399102 | 67400538 | 1437 |
| 1 | 53 | 6 | 80 | 80 | 85.40% | 3 | − | 91540504 | 91540578 | 75 |
| 1 | 52 | 1 | 70 | 80 | 87.20% | 12 | − | 34833316 | 34833385 | 70 |
| 1 | 49 | 1 | 80 | 80 | 86.90% | 10 | − | 41842156 | 41842234 | 79 |
| 1 | 49 | 7 | 80 | 80 | 94.60% | 1 | − | 121612371 | 121859704 | 247334 |
| 1 | 48 | 19 | 80 | 80 | 88.80% | 12 | − | 37236501 | 37236562 | 62 |
| 1 | 46 | 19 | 80 | 80 | 87.10% | 12 | − | 34831051 | 34831112 | 62 |
| 1 | 45 | 29 | 80 | 80 | 94.30% | 20 | − | 28760701 | 28760922 | 222 |
| 1 | 44 | 23 | 80 | 80 | 88.00% | Un_KI270366v1 | − | 3039 | 3096 | 58 |
| 1 | 44 | 7 | 66 | 80 | 86.70% | 9 | − | 63075458 | 63075517 | 60 |
| 1 | 44 | 7 | 80 | 80 | 79.80% | 10 | − | 41835720 | 41835793 | 74 |
| 1 | 43 | 29 | 80 | 80 | 92.20% | 5_GL000208v1_random | − | 44114 | 44477 | 364 |
| 1 | 42 | 29 | 80 | 80 | 90.40% | 7 | − | 57887856 | 57887907 | 52 |
| 1 | 42 | 29 | 80 | 80 | 90.40% | 5 | − | 46235561 | 46235612 | 52 |
| 1 | 42 | 29 | 80 | 80 | 90.40% | 3 | − | 93776326 | 93776377 | 52 |
| 1 | 42 | 29 | 80 | 80 | 90.40% | 2 | − | 94526601 | 94526652 | 52 |
| 1 | 41 | 32 | 80 | 80 | 91.90% | 7 | − | 57961929 | 57961977 | 49 |
| 1 | 41 | 28 | 80 | 80 | 88.70% | 12 | − | 37636906 | 37636958 | 53 |
| 1 | 40 | 33 | 80 | 80 | 91.70% | Y | − | 10611064 | 10611111 | 48 |
| 1 | 40 | 29 | 80 | 80 | 88.50% | Un_KI270757v1 | − | 69231 | 69282 | 52 |
| 1 | 40 | 29 | 80 | 80 | 88.50% | 2 | − | 94519096 | 94519147 | 52 |
| 1 | 40 | 31 | 80 | 80 | 90.00% | 12 | − | 37347491 | 37347540 | 50 |
| 1 | 40 | 29 | 80 | 80 | 88.50% | 10 | − | 39474813 | 39474864 | 52 |
| 1 | 39 | 28 | 80 | 80 | 86.80% | 12 | − | 37629404 | 37629456 | 53 |
| 1 | 38 | 29 | 80 | 80 | 86.60% | Y | − | 10224566 | 10224617 | 52 |
| 1 | 38 | 33 | 80 | 80 | 89.60% | 22_KI270738v1_random | − | 88363 | 88410 | 48 |
| 1 | 38 | 33 | 80 | 80 | 89.60% | 16 | − | 34206214 | 34206261 | 48 |
| 1 | 38 | 29 | 80 | 80 | 86.60% | 15 | − | 19810704 | 19810755 | 52 |
| 1 | 38 | 29 | 80 | 80 | 86.60% | 10 | − | 39433692 | 39433743 | 52 |
| 1 | 37 | 33 | 79 | 80 | 89.40% | 12 | − | 37253870 | 37253916 | 47 |
| 1 | 36 | 37 | 80 | 80 | 91.00% | 22 | − | 16010683 | 16010726 | 44 |
| 1 | 35 | 34 | 80 | 80 | 87.30% | 5 | − | 46428661 | 46428707 | 47 |
| 1 | 34 | 29 | 66 | 80 | 94.80% | 5 | − | 50180200 | 50180237 | 38 |
| 1 | 34 | 29 | 66 | 80 | 94.80% | 2 | − | 94542485 | 94542522 | 38 |
| 1 | 33 | 45 | 80 | 80 | 97.20% | 1 | − | 121859629 | 121859837 | 209 |
| 1 | 32 | 33 | 66 | 80 | 97.10% | 9 | − | 63089578 | 63089611 | 34 |
| 1 | 32 | 33 | 66 | 80 | 91.00% | 7 | − | 61300585 | 61300617 | 33 |
| 1 | 32 | 31 | 66 | 80 | 94.50% | 22 | − | 16077012 | 16077047 | 36 |
| 1 | 32 | 33 | 66 | 80 | 97.10% | 22 | − | 15205349 | 15205382 | 34 |
| 1 | 32 | 24 | 59 | 80 | 97.10% | 22 | − | 12333177 | 12333554 | 378 |
| 1 | 29 | 50 | 80 | 80 | 96.80% | 5 | − | 49626509 | 49626539 | 31 |
| 1 | 27 | 50 | 80 | 80 | 93.60% | 3 | − | 90708676 | 90708706 | 31 |
| 1 | 27 | 45 | 79 | 80 | 88.60% | 1 | − | 124993436 | 124993470 | 35 |
| 1 | 26 | 1 | 30 | 80 | 93.40% | Un_KI270411v1 | − | 771 | 800 | 30 |
| 1 | 26 | 33 | 64 | 80 | 90.70% | 22 | − | 16069657 | 16069688 | 32 |
| 1 | 26 | 51 | 80 | 80 | 93.40% | 10 | − | 41806251 | 41806280 | 30 |
| 1 | 25 | 1 | 29 | 80 | 93.20% | 3 | − | 93710289 | 93710317 | 29 |
| 1 | 22 | 45 | 66 | 80 | 100.00% | 5 | − | 50205720 | 50205741 | 22 |
| 10 | 80 | 1 | 80 | 80 | 100.00% | 3 | − | 93708028 | 93708107 | 80 |
| 10 | 80 | 1 | 80 | 80 | 100.00% | 3 | − | 93710913 | 93710992 | 80 |
| 10 | 80 | 1 | 80 | 80 | 100.00% | 3 | + | 91649275 | 91649354 | 80 |
| 10 | 80 | 1 | 80 | 80 | 100.00% | 3 | + | 91643494 | 91643573 | 80 |
| 10 | 80 | 1 | 80 | 80 | 100.00% | 3 | + | 91636352 | 91636431 | 80 |
| 10 | 80 | 1 | 80 | 80 | 100.00% | 3 | + | 91627682 | 91627761 | 80 |
| 10 | 80 | 1 | 80 | 80 | 100.00% | 3 | + | 91624790 | 91624869 | 80 |
| 10 | 80 | 1 | 80 | 80 | 100.00% | 3 | + | 91621897 | 91621976 | 80 |
| 10 | 80 | 1 | 80 | 80 | 100.00% | 3 | + | 91619005 | 91619084 | 80 |
| 10 | 80 | 1 | 80 | 80 | 100.00% | 3 | + | 91616114 | 91616193 | 80 |
| 10 | 80 | 1 | 80 | 80 | 100.00% | 3 | + | 91610670 | 91610749 | 80 |
| 10 | 80 | 1 | 80 | 80 | 100.00% | 3 | + | 91599103 | 91599182 | 80 |
| 10 | 80 | 1 | 80 | 80 | 100.00% | 3 | + | 91596212 | 91596291 | 80 |
| 10 | 80 | 1 | 80 | 80 | 100.00% | 3 | + | 91592982 | 91593061 | 80 |
| 10 | 80 | 1 | 80 | 80 | 100.00% | 3 | + | 91588048 | 91588127 | 80 |
| 10 | 80 | 1 | 80 | 80 | 100.00% | 3 | + | 91573595 | 91573674 | 80 |
| 10 | 80 | 1 | 80 | 80 | 100.00% | 3 | + | 91565255 | 91565334 | 80 |
| 10 | 80 | 1 | 80 | 80 | 100.00% | 3 | + | 91559804 | 91559883 | 80 |
| 10 | 78 | 1 | 80 | 80 | 98.80% | 3 | − | 91551019 | 91551098 | 80 |
| 10 | 76 | 1 | 80 | 80 | 97.50% | 3 | − | 91542694 | 91542773 | 80 |
| 10 | 72 | 1 | 80 | 80 | 95.00% | 3 | − | 91544904 | 91544983 | 80 |
| 10 | 70 | 1 | 80 | 80 | 93.80% | 3 | − | 91547119 | 91547198 | 80 |
| 10 | 64 | 1 | 80 | 80 | 90.00% | 3 | − | 93714814 | 93714893 | 80 |
| 10 | 64 | 1 | 80 | 80 | 90.00% | 3 | − | 90575684 | 90575763 | 80 |
| 10 | 63 | 1 | 80 | 80 | 90.00% | 3 | − | 90555710 | 90634361 | 78652 |
| 10 | 62 | 1 | 80 | 80 | 88.80% | 10 | − | 41838082 | 41838161 | 80 |
| 10 | 61 | 1 | 80 | 80 | 88.80% | 3 | − | 90509626 | 90532074 | 22449 |
| 10 | 60 | 1 | 80 | 80 | 87.50% | 3 | − | 90613130 | 90613209 | 80 |
| 10 | 60 | 1 | 80 | 80 | 87.50% | 3 | − | 90600765 | 90600844 | 80 |
| 10 | 60 | 1 | 80 | 80 | 87.50% | 3 | − | 90485193 | 90485272 | 80 |
| 10 | 59 | 1 | 68 | 80 | 94.20% | 10 | − | 41833865 | 41840361 | 6497 |
| 10 | 58 | 1 | 80 | 80 | 83.60% | 3 | − | 90498916 | 90498994 | 79 |
| 10 | 52 | 1 | 68 | 80 | 88.30% | 3 | − | 90638554 | 90638621 | 68 |
| 10 | 50 | 1 | 68 | 80 | 86.80% | 3 | − | 90545644 | 90545711 | 68 |
| 10 | 48 | 16 | 79 | 80 | 87.50% | 12 | − | 34712579 | 34712642 | 64 |
| 10 | 47 | 1 | 59 | 80 | 91.30% | 3 | − | 90520976 | 90521034 | 59 |
| 10 | 47 | 1 | 59 | 80 | 89.90% | 3 | − | 90593213 | 90593271 | 59 |
| 10 | 46 | 1 | 60 | 80 | 88.40% | 3 | − | 90500811 | 90500870 | 60 |
| 10 | 42 | 29 | 80 | 80 | 90.40% | 21 | − | 10756848 | 10756899 | 52 |
| 10 | 42 | 29 | 80 | 80 | 90.40% | 19 | − | 27333090 | 27333141 | 52 |
| 10 | 41 | 34 | 80 | 80 | 93.70% | 22 | − | 12355283 | 12355329 | 47 |
| 10 | 40 | 33 | 80 | 80 | 91.70% | 7 | − | 57969838 | 57969885 | 48 |
| 10 | 39 | 34 | 80 | 80 | 91.50% | Un_KI270589v1 | − | 27295 | 27341 | 47 |
| 10 | 39 | 34 | 80 | 80 | 91.50% | Un_KI270579v1 | − | 27288 | 27334 | 47 |
| 10 | 39 | 34 | 80 | 80 | 91.50% | 7 | − | 57960043 | 57960089 | 47 |
| 10 | 39 | 33 | 79 | 80 | 91.50% | 22 | − | 16054829 | 16054875 | 47 |
| 10 | 39 | 34 | 80 | 80 | 91.50% | 22 | − | 11377572 | 11377618 | 47 |
| 10 | 39 | 34 | 80 | 80 | 91.50% | 20 | − | 29863881 | 29863927 | 47 |
| 10 | 39 | 34 | 80 | 80 | 91.50% | 11 | − | 50769658 | 50769704 | 47 |
| 10 | 38 | 35 | 80 | 80 | 91.40% | Un_KI270589v1 | − | 13168 | 13213 | 46 |
| 10 | 38 | 33 | 80 | 80 | 89.60% | 2 | − | 94549121 | 94549168 | 48 |
| 10 | 37 | 1 | 59 | 80 | 81.40% | 3 | − | 90508118 | 90508176 | 59 |
| 10 | 37 | 29 | 73 | 80 | 91.20% | 15 | − | 19820860 | 19820904 | 45 |
| 10 | 36 | 41 | 80 | 80 | 95.00% | Un_KI270579v1 | − | 27628 | 27667 | 40 |
| 10 | 36 | 33 | 80 | 80 | 87.50% | 22_KI270738v1_random | − | 86238 | 86285 | 48 |
| 10 | 36 | 40 | 80 | 80 | 95.00% | 21 | − | 10762823 | 10762863 | 41 |
| 10 | 36 | 41 | 80 | 80 | 95.00% | 21 | − | 5285438 | 5285477 | 40 |
| 10 | 36 | 33 | 80 | 80 | 87.50% | 14 | − | 18257663 | 18257710 | 48 |
| 10 | 35 | 40 | 80 | 80 | 92.70% | Un_KI270442v1 | − | 144873 | 144913 | 41 |
| 10 | 35 | 40 | 80 | 80 | 92.70% | 9 | − | 63077148 | 63077188 | 41 |
| 10 | 35 | 40 | 80 | 80 | 92.70% | 3 | − | 93778203 | 93778243 | 41 |
| 10 | 35 | 40 | 80 | 80 | 92.70% | 22 | − | 16051073 | 16051113 | 41 |
| 10 | 35 | 40 | 80 | 80 | 92.70% | 22 | − | 16052263 | 16052303 | 41 |
| 10 | 35 | 40 | 80 | 80 | 92.70% | 22 | − | 15184868 | 15184908 | 41 |
| 10 | 35 | 40 | 80 | 80 | 92.70% | 21 | − | 12985458 | 12985498 | 41 |
| 10 | 34 | 33 | 78 | 80 | 87.00% | Un_KI270589v1 | − | 29515 | 29560 | 46 |
| 10 | 34 | 34 | 73 | 80 | 92.50% | 22 | − | 12356485 | 12356524 | 40 |
| 10 | 34 | 40 | 79 | 80 | 92.50% | 21 | − | 7225624 | 7225663 | 40 |
| 10 | 33 | 42 | 80 | 80 | 92.40% | Un_KI270519v1 | − | 30518 | 30556 | 39 |
| 10 | 33 | 40 | 80 | 80 | 90.30% | Un_KI270519v1 | − | 32383 | 32423 | 41 |
| 10 | 33 | 42 | 80 | 80 | 92.40% | Un_KI270442v1 | − | 370163 | 370201 | 39 |
| 10 | 33 | 40 | 80 | 80 | 90.30% | 7 | − | 57975983 | 57976023 | 41 |
| 10 | 33 | 40 | 80 | 80 | 90.30% | 22 | − | 12364118 | 12364158 | 41 |
| 10 | 33 | 26 | 68 | 80 | 83.40% | 12 | − | 37885575 | 37885616 | 42 |
| 10 | 32 | 40 | 73 | 80 | 97.10% | Un_KI270589v1 | − | 15210 | 15243 | 34 |
| 10 | 32 | 42 | 79 | 80 | 92.20% | 7 | − | 57980764 | 57980801 | 38 |
| 10 | 32 | 43 | 80 | 80 | 92.20% | 21 | − | 5289218 | 5289255 | 38 |
| 10 | 32 | 45 | 80 | 80 | 94.50% | 16 | − | 36257813 | 36257848 | 36 |
| 10 | 31 | 33 | 73 | 80 | 87.90% | 22 | − | 15186415 | 15186455 | 41 |
| 10 | 31 | 27 | 73 | 80 | 83.00% | 12 | − | 37929402 | 37929448 | 47 |
| 10 | 31 | 44 | 80 | 80 | 91.90% | 11 | − | 50769318 | 50769354 | 37 |
| 10 | 30 | 1 | 68 | 80 | 86.20% | 11 | − | 50778972 | 50779038 | 67 |
| 10 | 29 | 1 | 59 | 80 | 90.40% | 3 | − | 93710254 | 93710311 | 58 |
| 10 | 29 | 44 | 80 | 80 | 85.80% | 22 | − | 16063523 | 16063558 | 36 |
| 10 | 29 | 42 | 72 | 80 | 96.80% | 21 | − | 5291668 | 5291698 | 31 |
| 10 | 29 | 34 | 68 | 80 | 91.50% | 15 | − | 19815145 | 19815179 | 35 |
| 10 | 29 | 26 | 68 | 80 | 89.20% | 12 | − | 37850823 | 37851037 | 215 |
| 10 | 29 | 27 | 73 | 80 | 80.90% | 12 | − | 37920020 | 37920066 | 47 |
| 10 | 28 | 42 | 73 | 80 | 93.80% | 22 | − | 16009320 | 16009351 | 32 |
| 10 | 28 | 42 | 73 | 80 | 93.80% | 21 | − | 12982905 | 12982936 | 32 |
| 10 | 28 | 40 | 73 | 80 | 94.00% | 12 | − | 37268192 | 37268226 | 35 |
| 10 | 28 | 27 | 68 | 80 | 83.40% | 12 | − | 37844185 | 37844226 | 42 |
| 10 | 27 | 27 | 59 | 80 | 91.00% | 11 | − | 54933954 | 54933986 | 33 |
| 10 | 27 | 29 | 59 | 80 | 93.60% | 1 | − | 124976046 | 124976076 | 31 |
| 10 | 26 | 44 | 73 | 80 | 93.40% | 22_KI270738v1_random | − | 88364 | 88393 | 30 |
| 10 | 26 | 27 | 58 | 80 | 90.70% | 10 | − | 39298365 | 39298396 | 32 |
| 10 | 26 | 40 | 73 | 80 | 88.30% | 1 | − | 122462724 | 122462757 | 34 |
| 10 | 25 | 45 | 73 | 80 | 93.20% | 21 | − | 10758390 | 10758418 | 29 |
| 10 | 24 | 34 | 59 | 80 | 96.20% | 20 | − | 28876434 | 28876459 | 26 |
| 10 | 23 | 26 | 58 | 80 | 84.90% | 12 | − | 37876030 | 37876062 | 33 |
| 10 | 23 | 43 | 73 | 80 | 87.10% | 10 | − | 41831654 | 41831684 | 31 |
| 10 | 21 | 44 | 68 | 80 | 92.00% | 22_KI270738v1_random | − | 86419 | 86443 | 25 |
| 10 | 21 | 44 | 68 | 80 | 92.00% | 22 | − | 12353416 | 12353440 | 25 |
| 10 | 20 | 40 | 59 | 80 | 100.00% | 3 | − | 90641959 | 90641978 | 20 |
| 10 | 20 | 45 | 68 | 80 | 91.70% | 12 | − | 37853963 | 37853986 | 24 |
| 11 | 80 | 1 | 80 | 80 | 100.00% | 3 | + | 91997659 | 91997738 | 80 |
| 11 | 80 | 1 | 80 | 80 | 100.00% | 3 | + | 91982864 | 91982943 | 80 |
| 11 | 80 | 1 | 80 | 80 | 100.00% | 3 | + | 91977079 | 91977158 | 80 |
| 11 | 80 | 1 | 80 | 80 | 100.00% | 3 | + | 91927923 | 91928002 | 80 |
| 11 | 80 | 1 | 80 | 80 | 100.00% | 3 | + | 91922139 | 91922218 | 80 |
| 11 | 80 | 1 | 80 | 80 | 100.00% | 3 | + | 91890743 | 91890822 | 80 |
| 11 | 80 | 1 | 80 | 80 | 100.00% | 3 | + | 91854183 | 91854262 | 80 |
| 11 | 80 | 1 | 80 | 80 | 100.00% | 3 | + | 91842613 | 91842692 | 80 |
| 11 | 80 | 1 | 80 | 80 | 100.00% | 3 | + | 91836828 | 91836907 | 80 |
| 11 | 80 | 1 | 80 | 80 | 100.00% | 3 | + | 91817264 | 91817343 | 80 |
| 11 | 80 | 1 | 80 | 80 | 100.00% | 3 | + | 91802809 | 91802888 | 80 |
| 11 | 80 | 1 | 80 | 80 | 100.00% | 3 | + | 91799918 | 91799997 | 80 |
| 11 | 80 | 1 | 80 | 80 | 100.00% | 3 | + | 91767768 | 91767847 | 80 |
| 11 | 80 | 1 | 80 | 80 | 100.00% | 3 | + | 91750419 | 91750498 | 80 |
| 11 | 80 | 1 | 80 | 80 | 100.00% | 3 | + | 91613639 | 91613718 | 80 |
| 11 | 80 | 1 | 80 | 80 | 100.00% | 3 | + | 91602074 | 91602153 | 80 |
| 11 | 78 | 1 | 80 | 80 | 98.80% | 3 | − | 91550939 | 91551018 | 80 |
| 11 | 76 | 1 | 80 | 80 | 97.50% | 3 | − | 93707948 | 93708027 | 80 |
| 11 | 76 | 1 | 80 | 80 | 97.50% | 3 | − | 93710833 | 93710912 | 80 |
| 11 | 74 | 1 | 80 | 80 | 96.30% | 3 | − | 91542614 | 91542693 | 80 |
| 11 | 74 | 1 | 80 | 80 | 96.30% | 3 | − | 91544824 | 91544903 | 80 |
| 11 | 74 | 1 | 80 | 80 | 96.30% | 3 | − | 91547039 | 91547118 | 80 |
| 11 | 70 | 1 | 80 | 80 | 93.80% | 10 | − | 41831907 | 41831986 | 80 |
| 11 | 68 | 1 | 80 | 80 | 92.50% | 3 | − | 93714734 | 93714813 | 80 |
| 11 | 68 | 1 | 80 | 80 | 92.50% | 3 | − | 93716257 | 93716336 | 80 |
| 11 | 68 | 1 | 80 | 80 | 92.50% | 10 | − | 41835634 | 41835713 | 80 |
| 11 | 68 | 1 | 80 | 80 | 92.50% | 10 | − | 41840203 | 41840282 | 80 |
| 11 | 64 | 1 | 80 | 80 | 90.00% | 3 | − | 90598981 | 90599060 | 80 |
| 11 | 64 | 1 | 80 | 80 | 90.00% | 2 | − | 94527370 | 94527449 | 80 |
| 11 | 63 | 2 | 80 | 80 | 89.90% | 22 | − | 15161071 | 15161149 | 79 |
| 11 | 63 | 1 | 80 | 80 | 90.00% | 20 | − | 29701711 | 29713360 | 11650 |
| 11 | 62 | 2 | 80 | 80 | 89.80% | 3 | − | 90621526 | 90621946 | 421 |
| 11 | 62 | 1 | 80 | 80 | 88.80% | 3 | − | 90496461 | 90496540 | 80 |
| 11 | 62 | 1 | 80 | 80 | 88.80% | 22 | − | 16036304 | 16036383 | 80 |
| 11 | 62 | 1 | 80 | 80 | 88.80% | 22 | − | 15163800 | 15163879 | 80 |
| 11 | 62 | 1 | 80 | 80 | 88.80% | 2 | − | 94551261 | 94551340 | 80 |
| 11 | 62 | 1 | 80 | 80 | 89.80% | 11 | − | 55254796 | 55255047 | 252 |
| 11 | 62 | 1 | 80 | 80 | 88.80% | 11 | − | 48915432 | 48915511 | 80 |
| 11 | 61 | 1 | 80 | 80 | 89.70% | 2 | − | 94517816 | 94518065 | 250 |
| 11 | 61 | 1 | 80 | 80 | 88.80% | 11 | − | 55256150 | 55257431 | 1282 |
| 11 | 60 | 1 | 80 | 80 | 87.50% | 3 | − | 90449684 | 90449763 | 80 |
| 11 | 60 | 1 | 80 | 80 | 87.50% | 22 | − | 15167211 | 15167290 | 80 |
| 11 | 60 | 1 | 80 | 80 | 87.50% | 20 | − | 29704267 | 29704346 | 80 |
| 11 | 60 | 1 | 80 | 80 | 87.50% | 2 | − | 94525985 | 94526064 | 80 |
| 11 | 60 | 1 | 80 | 80 | 87.50% | 14 | − | 18244779 | 18244858 | 80 |
| 11 | 59 | 1 | 80 | 80 | 87.50% | 11 | − | 48921371 | 48933809 | 12439 |
| 11 | 59 | 1 | 80 | 80 | 87.50% | 1 | − | 124995731 | 124997517 | 1787 |
| 11 | 59 | 1 | 80 | 80 | 88.40% | 1 | − | 124976116 | 124976195 | 80 |
| 11 | 58 | 1 | 80 | 80 | 86.30% | 5 | − | 47091166 | 47091245 | 80 |
| 11 | 58 | 1 | 80 | 80 | 86.30% | 3 | − | 90498156 | 90498235 | 80 |
| 11 | 58 | 1 | 80 | 80 | 86.30% | 3 | − | 90509546 | 90509625 | 80 |
| 11 | 58 | 1 | 80 | 80 | 86.30% | 3 | − | 90456136 | 90456215 | 80 |
| 11 | 58 | 1 | 80 | 80 | 86.30% | 22 | − | 16039926 | 16040005 | 80 |
| 11 | 58 | 1 | 80 | 80 | 86.30% | 2 | − | 94523090 | 94523169 | 80 |
| 11 | 57 | 1 | 80 | 80 | 88.00% | 5_GL000208v1_random | − | 47241 | 47491 | 251 |
| 11 | 57 | 2 | 80 | 80 | 86.10% | 22 | − | 16039071 | 16039149 | 79 |
| 11 | 57 | 1 | 80 | 80 | 86.10% | 21 | − | 12965841 | 12966262 | 422 |
| 11 | 56 | 1 | 80 | 80 | 85.00% | 3 | − | 91538541 | 91538620 | 80 |
| 11 | 56 | 1 | 80 | 80 | 85.00% | 3 | − | 90405456 | 90405535 | 80 |
| 11 | 56 | 1 | 80 | 80 | 85.00% | 22_KI270739v1_random | − | 45404 | 45483 | 80 |
| 11 | 56 | 1 | 80 | 80 | 85.00% | 22 | − | 16001756 | 16001835 | 80 |
| 11 | 56 | 1 | 80 | 80 | 85.00% | 17 | − | 26880421 | 26880500 | 80 |
| 11 | 56 | 1 | 80 | 80 | 85.00% | 11 | − | 48913696 | 48913775 | 80 |
| 11 | 55 | 2 | 80 | 80 | 84.90% | 20 | − | 30979467 | 30979545 | 79 |
| 11 | 55 | 18 | 80 | 80 | 93.70% | 10 | − | 41833773 | 41833835 | 63 |
| 11 | 54 | 1 | 80 | 80 | 83.80% | 5 | − | 47086416 | 47086495 | 80 |
| 11 | 54 | 1 | 80 | 80 | 83.80% | 22 | − | 15175916 | 15175995 | 80 |
| 11 | 54 | 2 | 80 | 80 | 88.60% | 14 | − | 18228743 | 18229162 | 420 |
| 11 | 54 | 1 | 80 | 80 | 83.80% | 11 | − | 55247631 | 55247710 | 80 |
| 11 | 54 | 1 | 80 | 80 | 91.00% | 11 | − | 50767708 | 50767954 | 247 |
| 11 | 53 | 1 | 80 | 80 | 88.60% | Un_KI270442v1 | − | 121500 | 122916 | 1417 |
| 11 | 53 | 1 | 80 | 80 | 89.60% | 5 | − | 46332980 | 46333399 | 420 |
| 11 | 53 | 2 | 80 | 80 | 88.50% | 3 | − | 91523506 | 91523924 | 419 |
| 11 | 53 | 1 | 80 | 80 | 83.80% | 3 | − | 90403921 | 90499425 | 95505 |
| 11 | 53 | 2 | 80 | 80 | 83.60% | 14 | − | 18239661 | 18239739 | 79 |
| 11 | 53 | 1 | 80 | 80 | 83.80% | 1 | − | 124958321 | 124959254 | 934 |
| 11 | 52 | 1 | 80 | 80 | 82.50% | 11 | − | 55258036 | 55258115 | 80 |
| 11 | 51 | 18 | 80 | 80 | 90.50% | 3 | − | 91527761 | 91527823 | 63 |
| 11 | 51 | 20 | 80 | 80 | 91.90% | 3 | − | 90577982 | 90578042 | 61 |
| 11 | 51 | 18 | 80 | 80 | 90.50% | 22_KI270739v1_random | − | 59626 | 59688 | 63 |
| 11 | 51 | 18 | 80 | 80 | 90.50% | 22 | − | 16032546 | 16032608 | 63 |
| 11 | 51 | 2 | 80 | 80 | 83.10% | 22 | − | 15189231 | 15189308 | 78 |
| 11 | 51 | 18 | 80 | 80 | 90.50% | 22 | − | 15169776 | 15169838 | 63 |
| 11 | 50 | 19 | 80 | 80 | 90.40% | 5 | − | 46418401 | 46418462 | 62 |
| 11 | 50 | 21 | 80 | 80 | 91.70% | 22_KI270739v1_random | − | 56551 | 56610 | 60 |
| 11 | 50 | 1 | 80 | 80 | 81.30% | 20 | − | 30984741 | 30984820 | 80 |
| 11 | 50 | 1 | 60 | 80 | 91.70% | 12 | − | 34710651 | 34710710 | 60 |
| 11 | 49 | 18 | 80 | 80 | 88.90% | 3 | − | 93765881 | 93765943 | 63 |
| 11 | 49 | 18 | 80 | 80 | 88.90% | 22 | − | 13010111 | 13010173 | 63 |
| 11 | 49 | 18 | 80 | 80 | 88.90% | 2 | − | 94533001 | 94533063 | 63 |
| 11 | 49 | 18 | 80 | 80 | 88.90% | 14 | − | 16129316 | 16129378 | 63 |
| 11 | 49 | 18 | 80 | 80 | 88.90% | 1 | − | 124979346 | 124979408 | 63 |
| 11 | 47 | 18 | 80 | 80 | 87.40% | 11 | − | 55249851 | 55249913 | 63 |
| 11 | 46 | 21 | 80 | 80 | 88.40% | 22 | − | 16041446 | 16041505 | 60 |
| 11 | 46 | 1 | 60 | 80 | 88.40% | 22 | − | 15159048 | 15159107 | 60 |
| 11 | 45 | 20 | 80 | 80 | 86.90% | 20 | − | 29698978 | 29699038 | 61 |
| 11 | 43 | 26 | 80 | 80 | 89.10% | 9 | − | 60644999 | 60645053 | 55 |
| 11 | 41 | 18 | 80 | 80 | 82.60% | Un_KI270757v1 | − | 59726 | 59788 | 63 |
| 11 | 41 | 28 | 80 | 80 | 88.70% | 1 | − | 124986851 | 124986903 | 53 |
| 11 | 40 | 18 | 80 | 80 | 93.50% | 11 | − | 55233465 | 55233868 | 404 |
| 11 | 39 | 1 | 47 | 80 | 91.50% | Un_KI270422v1 | − | 666 | 712 | 47 |
| 11 | 39 | 33 | 80 | 80 | 91.70% | 2 | − | 94516796 | 94517014 | 219 |
| 11 | 36 | 2 | 45 | 80 | 91.00% | 20 | − | 30980850 | 30980893 | 44 |
| 11 | 35 | 18 | 80 | 80 | 89.20% | 20 | − | 30996656 | 30996716 | 61 |
| 11 | 34 | 1 | 47 | 80 | 87.50% | 11 | − | 48936499 | 48936544 | 46 |
| 11 | 29 | 2 | 38 | 80 | 89.20% | 5 | − | 46361577 | 46361613 | 37 |
| 11 | 24 | 49 | 80 | 80 | 87.50% | 5 | − | 46361706 | 46361737 | 32 |
| 11 | 23 | 18 | 42 | 80 | 96.00% | 16 | − | 34612003 | 34612027 | 25 |
| 11 | 22 | 1 | 34 | 80 | 82.40% | 22 | − | 15957342 | 15957375 | 34 |
| 11 | 20 | 57 | 80 | 80 | 91.70% | 20 | − | 29713110 | 29713133 | 24 |
| 11 | 20 | 28 | 47 | 80 | 100.00% | 2 | − | 94550097 | 94550116 | 20 |
| 12 | 80 | 1 | 80 | 80 | 100.00% | 3 | − | 93713482 | 93713561 | 80 |
| 12 | 80 | 1 | 80 | 80 | 100.00% | 3 | − | 91544583 | 91544662 | 80 |
| 12 | 80 | 1 | 80 | 80 | 100.00% | 3 | − | 91550699 | 91550778 | 80 |
| 12 | 80 | 1 | 80 | 80 | 100.00% | 3 | + | 91681077 | 91681156 | 80 |
| 12 | 80 | 1 | 80 | 80 | 100.00% | 3 | + | 91675297 | 91675376 | 80 |
| 12 | 80 | 1 | 80 | 80 | 100.00% | 3 | + | 91669512 | 91669591 | 80 |
| 12 | 80 | 1 | 80 | 80 | 100.00% | 3 | + | 91652493 | 91652572 | 80 |
| 12 | 80 | 1 | 80 | 80 | 100.00% | 3 | + | 91643814 | 91643893 | 80 |
| 12 | 80 | 1 | 80 | 80 | 100.00% | 3 | + | 91636672 | 91636751 | 80 |
| 12 | 80 | 1 | 80 | 80 | 100.00% | 3 | + | 91628002 | 91628081 | 80 |
| 12 | 80 | 1 | 80 | 80 | 100.00% | 3 | + | 91613879 | 91613958 | 80 |
| 12 | 80 | 1 | 80 | 80 | 100.00% | 3 | + | 91605208 | 91605287 | 80 |
| 12 | 80 | 1 | 80 | 80 | 100.00% | 3 | + | 91599423 | 91599502 | 80 |
| 12 | 80 | 1 | 80 | 80 | 100.00% | 3 | + | 91596532 | 91596611 | 80 |
| 12 | 80 | 1 | 80 | 80 | 100.00% | 3 | + | 91593302 | 91593381 | 80 |
| 12 | 80 | 1 | 80 | 80 | 100.00% | 3 | + | 91590407 | 91590486 | 80 |
| 12 | 80 | 1 | 80 | 80 | 100.00% | 3 | + | 91588368 | 91588447 | 80 |
| 12 | 80 | 1 | 80 | 80 | 100.00% | 3 | + | 91582583 | 91582662 | 80 |
| 12 | 80 | 1 | 80 | 80 | 100.00% | 3 | + | 91576802 | 91576881 | 80 |
| 12 | 78 | 1 | 80 | 80 | 98.80% | 3 | − | 93710593 | 93710672 | 80 |
| 12 | 78 | 1 | 80 | 80 | 98.80% | 3 | − | 93707708 | 93707787 | 80 |
| 12 | 78 | 1 | 80 | 80 | 98.80% | 3 | − | 91546798 | 91546877 | 80 |
| 12 | 72 | 1 | 80 | 80 | 95.00% | 3 | − | 93715345 | 93715424 | 80 |
| 12 | 68 | 1 | 80 | 80 | 92.50% | 12 | − | 37265167 | 37265246 | 80 |
| 12 | 65 | 1 | 80 | 80 | 91.30% | 12 | − | 34718537 | 34834136 | 115600 |
| 12 | 64 | 2 | 80 | 80 | 91.20% | 3 | − | 93707033 | 93707278 | 246 |
| 12 | 64 | 2 | 80 | 80 | 91.20% | 3 | − | 93712467 | 93712713 | 247 |
| 12 | 64 | 2 | 80 | 80 | 91.20% | 12 | − | 34716850 | 34717093 | 244 |
| 12 | 63 | 1 | 80 | 80 | 90.00% | 12 | − | 34717858 | 34718617 | 760 |
| 12 | 62 | 1 | 80 | 80 | 88.80% | 5 | − | 49610180 | 49610259 | 80 |
| 12 | 62 | 1 | 80 | 80 | 88.80% | 5 | − | 49631535 | 49631614 | 80 |
| 12 | 62 | 2 | 80 | 80 | 89.90% | 3 | − | 91541705 | 91541944 | 240 |
| 12 | 62 | 1 | 80 | 80 | 88.80% | 10 | − | 41840813 | 41840892 | 80 |
| 12 | 61 | 1 | 74 | 80 | 91.90% | 12 | − | 37251118 | 37254019 | 2902 |
| 12 | 61 | 8 | 80 | 80 | 91.80% | 12 | − | 37263475 | 37263547 | 73 |
| 12 | 61 | 6 | 80 | 80 | 90.70% | 12 | − | 34717522 | 34717596 | 75 |
| 12 | 60 | 1 | 80 | 80 | 87.50% | Un_KI270317v1 | − | 1492 | 1571 | 80 |
| 12 | 60 | 1 | 80 | 80 | 87.50% | Un_KI270317v1 | − | 37214 | 37293 | 80 |
| 12 | 60 | 1 | 80 | 80 | 87.50% | 5 | − | 49623465 | 49623544 | 80 |
| 12 | 60 | 1 | 80 | 80 | 87.50% | 5 | − | 49625504 | 49625583 | 80 |
| 12 | 60 | 1 | 76 | 80 | 89.50% | 5 | − | 49611202 | 49611277 | 76 |
| 12 | 60 | 1 | 80 | 80 | 87.50% | 4 | − | 67399796 | 67399875 | 80 |
| 12 | 60 | 2 | 80 | 80 | 88.70% | 3 | − | 91552909 | 91553154 | 246 |
| 12 | 60 | 1 | 76 | 80 | 89.50% | 16 | − | 38280320 | 38280395 | 76 |
| 12 | 60 | 1 | 71 | 80 | 93.00% | 12 | − | 37254629 | 37257395 | 2767 |
| 12 | 60 | 8 | 75 | 80 | 91.10% | 12 | − | 37262797 | 37262863 | 67 |
| 12 | 60 | 1 | 74 | 80 | 90.60% | 12 | − | 34832649 | 34832722 | 74 |
| 12 | 59 | 1 | 80 | 80 | 94.10% | 12 | − | 37258671 | 37258806 | 136 |
| 12 | 59 | 1 | 72 | 80 | 91.70% | 12 | − | 34832991 | 34833171 | 181 |
| 12 | 58 | 1 | 74 | 80 | 89.20% | 12 | − | 34830733 | 34830806 | 74 |
| 12 | 57 | 8 | 74 | 80 | 92.60% | 12 | − | 37266531 | 37266597 | 67 |
| 12 | 56 | 1 | 80 | 80 | 85.00% | Un_KI270312v1 | − | 38 | 117 | 80 |
| 12 | 56 | 1 | 74 | 80 | 87.90% | 12 | − | 34829375 | 34829448 | 74 |
| 12 | 54 | 1 | 76 | 80 | 85.60% | 16 | − | 38279306 | 38279381 | 76 |
| 12 | 53 | 8 | 72 | 80 | 90.80% | 4 | − | 67398785 | 67398849 | 65 |
| 12 | 53 | 2 | 80 | 80 | 83.60% | 3 | − | 90360495 | 90360573 | 79 |
| 12 | 52 | 5 | 76 | 80 | 86.20% | 14 | − | 18248125 | 18248196 | 72 |
| 12 | 50 | 5 | 80 | 80 | 82.90% | 5 | − | 46357746 | 46357821 | 76 |
| 12 | 50 | 5 | 80 | 80 | 82.90% | 12 | − | 37671976 | 37672051 | 76 |
| 12 | 50 | 5 | 80 | 80 | 82.90% | 11 | − | 50780953 | 50781028 | 76 |
| 12 | 49 | 5 | 80 | 80 | 82.90% | 3 | − | 90287633 | 90578158 | 290526 |
| 12 | 49 | 6 | 72 | 80 | 86.60% | 12 | − | 37260434 | 37260500 | 67 |
| 12 | 49 | 2 | 80 | 80 | 81.10% | 12 | − | 37694026 | 37694104 | 79 |
| 12 | 49 | 2 | 76 | 80 | 82.70% | 11 | − | 50775330 | 50775404 | 75 |
| 12 | 49 | 2 | 80 | 80 | 81.10% | 11 | − | 50729863 | 50729941 | 79 |
| 12 | 49 | 2 | 80 | 80 | 81.10% | 10 | − | 39489421 | 39489499 | 79 |
| 12 | 48 | 2 | 69 | 80 | 85.30% | 3 | − | 90643159 | 90643226 | 68 |
| 12 | 48 | 11 | 76 | 80 | 86.40% | 16 | − | 38268796 | 38268861 | 66 |
| 12 | 48 | 5 | 80 | 80 | 91.40% | 14 | − | 18231570 | 18231816 | 247 |
| 12 | 48 | 1 | 80 | 80 | 88.80% | 14 | − | 16129246 | 16129496 | 251 |
| 12 | 47 | 2 | 80 | 80 | 79.80% | Un_KI270442v1 | − | 207790 | 207868 | 79 |
| 12 | 46 | 5 | 80 | 80 | 80.30% | 14 | − | 16127416 | 16127491 | 76 |
| 12 | 46 | 5 | 76 | 80 | 82.00% | 12 | − | 37675727 | 37675798 | 72 |
| 12 | 46 | 2 | 80 | 80 | 91.10% | 10 | − | 39439308 | 39473539 | 34232 |
| 12 | 45 | 5 | 73 | 80 | 88.70% | 3 | − | 90672344 | 90672411 | 68 |
| 12 | 45 | 2 | 80 | 80 | 78.50% | 12 | − | 37673165 | 37673243 | 79 |
| 12 | 45 | 2 | 80 | 80 | 78.50% | 11 | − | 55233907 | 55233985 | 79 |
| 12 | 44 | 5 | 72 | 80 | 82.40% | Un_KI270411v1 | − | 1761 | 1828 | 68 |
| 12 | 43 | 2 | 80 | 80 | 95.80% | 10 | − | 39473461 | 39484892 | 11432 |
| 12 | 42 | 2 | 57 | 80 | 87.50% | 5 | − | 46431426 | 46431481 | 56 |
| 12 | 41 | 5 | 80 | 80 | 91.90% | 3 | − | 93710254 | 93710497 | 244 |
| 12 | 41 | 5 | 73 | 80 | 79.80% | 3 | − | 90519625 | 90519693 | 69 |
| 12 | 41 | 2 | 75 | 80 | 90.20% | 11 | − | 48760140 | 48760214 | 75 |
| 12 | 37 | 5 | 57 | 80 | 85.00% | 3 | − | 90653859 | 90653911 | 53 |
| 12 | 37 | 2 | 80 | 80 | 95.20% | 14 | − | 18268603 | 18268852 | 250 |
| 12 | 37 | 2 | 60 | 80 | 81.40% | 12 | − | 37702055 | 37702113 | 59 |
| 12 | 36 | 2 | 57 | 80 | 97.40% | 21 | − | 12996456 | 12996682 | 227 |
| 12 | 36 | 1 | 80 | 80 | 97.40% | 20 | − | 28876264 | 28876343 | 80 |
| 12 | 35 | 2 | 80 | 80 | 97.30% | 21 | − | 7222919 | 7222997 | 79 |
| 12 | 35 | 2 | 80 | 80 | 97.30% | 11 | − | 50779589 | 50779667 | 79 |
| 12 | 35 | 2 | 59 | 80 | 95.00% | 11 | − | 50726716 | 50726773 | 58 |
| 12 | 35 | 5 | 57 | 80 | 83.10% | 11 | − | 50799784 | 50799836 | 53 |
| 12 | 32 | 2 | 57 | 80 | 78.60% | 10 | − | 41839819 | 41839874 | 56 |
| 12 | 31 | 44 | 80 | 80 | 91.90% | 5 | − | 50198221 | 50198257 | 37 |
| 12 | 29 | 44 | 80 | 80 | 89.20% | 16 | − | 34612237 | 34612273 | 37 |
| 12 | 29 | 44 | 80 | 80 | 89.20% | 11 | − | 48915191 | 48915227 | 37 |
| 12 | 28 | 44 | 80 | 80 | 96.70% | 21 | − | 5297271 | 5297478 | 208 |
| 12 | 27 | 1 | 27 | 80 | 100.00% | 3 | − | 93705728 | 93705754 | 27 |
| 12 | 27 | 44 | 74 | 80 | 93.60% | 11 | − | 55251142 | 55251172 | 31 |
| 12 | 26 | 2 | 27 | 80 | 100.00% | 3 | − | 90636069 | 90636094 | 26 |
| 12 | 24 | 2 | 25 | 80 | 100.00% | 15 | − | 19813844 | 19813867 | 24 |
| 12 | 23 | 5 | 27 | 80 | 100.00% | 3 | − | 90674431 | 90674453 | 23 |
| 12 | 23 | 5 | 27 | 80 | 100.00% | 3 | − | 90683359 | 90683381 | 23 |
| 12 | 22 | 57 | 80 | 80 | 95.90% | Un_KI270317v1 | − | 473 | 496 | 24 |
| 12 | 22 | 2 | 25 | 80 | 95.90% | 14 | − | 16082967 | 16082990 | 24 |
| 12 | 22 | 2 | 25 | 80 | 95.90% | 11 | − | 50777601 | 50777624 | 24 |
| 12 | 21 | 5 | 25 | 80 | 100.00% | 7 | − | 62572906 | 62572926 | 21 |
| 13 | 80 | 1 | 80 | 80 | 100.00% | 3 | + | 91782552 | 91782631 | 80 |
| 13 | 80 | 1 | 80 | 80 | 100.00% | 3 | + | 91776766 | 91776845 | 80 |
| 13 | 80 | 1 | 80 | 80 | 100.00% | 3 | + | 91744957 | 91745036 | 80 |
| 13 | 80 | 1 | 80 | 80 | 100.00% | 3 | + | 91739515 | 91739594 | 80 |
| 13 | 80 | 1 | 80 | 80 | 100.00% | 3 | + | 91663810 | 91663889 | 80 |
| 13 | 80 | 1 | 80 | 80 | 100.00% | 3 | + | 91655466 | 91655545 | 80 |
| 13 | 80 | 1 | 80 | 80 | 100.00% | 3 | + | 91649675 | 91649754 | 80 |
| 13 | 80 | 1 | 80 | 80 | 100.00% | 3 | + | 91646786 | 91646865 | 80 |
| 13 | 80 | 1 | 80 | 80 | 100.00% | 3 | + | 91641001 | 91641080 | 80 |
| 13 | 80 | 1 | 80 | 80 | 100.00% | 3 | + | 91633861 | 91633940 | 80 |
| 13 | 80 | 1 | 80 | 80 | 100.00% | 3 | + | 91628082 | 91628161 | 80 |
| 13 | 80 | 1 | 80 | 80 | 100.00% | 3 | + | 91596612 | 91596691 | 80 |
| 13 | 80 | 1 | 80 | 80 | 100.00% | 3 | + | 91585556 | 91585635 | 80 |
| 13 | 80 | 1 | 80 | 80 | 100.00% | 3 | + | 91579771 | 91579850 | 80 |
| 13 | 80 | 1 | 80 | 80 | 100.00% | 3 | + | 91576882 | 91576961 | 80 |
| 13 | 80 | 1 | 80 | 80 | 100.00% | 3 | + | 91565655 | 91565734 | 80 |
| 13 | 78 | 1 | 80 | 80 | 98.80% | 3 | − | 91550619 | 91550698 | 80 |
| 13 | 77 | 2 | 80 | 80 | 98.80% | 3 | − | 91544503 | 91544581 | 79 |
| 13 | 74 | 1 | 80 | 80 | 96.30% | 3 | − | 93713402 | 93713481 | 80 |
| 13 | 74 | 1 | 80 | 80 | 96.30% | 3 | − | 93710513 | 93710592 | 80 |
| 13 | 72 | 1 | 80 | 80 | 95.00% | 3 | − | 93707628 | 93707707 | 80 |
| 13 | 72 | 1 | 80 | 80 | 92.50% | 3 | − | 91546719 | 91546797 | 79 |
| 13 | 65 | 1 | 80 | 80 | 91.20% | 3 | − | 93711368 | 93715674 | 4307 |
| 13 | 64 | 1 | 80 | 80 | 90.00% | 12 | − | 37265427 | 37265506 | 80 |
| 13 | 64 | 1 | 80 | 80 | 90.00% | 12 | − | 37263735 | 37263814 | 80 |
| 13 | 63 | 1 | 80 | 80 | 90.00% | 12 | − | 37239490 | 37239909 | 420 |
| 13 | 62 | 1 | 80 | 80 | 88.80% | 5 | − | 49643720 | 49643799 | 80 |
| 13 | 62 | 1 | 80 | 80 | 88.80% | 5 | − | 49626444 | 49626523 | 80 |
| 13 | 62 | 1 | 80 | 80 | 88.80% | 3 | − | 91552490 | 91552569 | 80 |
| 13 | 62 | 1 | 80 | 80 | 88.80% | 16 | − | 38265990 | 38266069 | 80 |
| 13 | 62 | 1 | 80 | 80 | 88.80% | 16 | − | 38276169 | 38276248 | 80 |
| 13 | 62 | 1 | 80 | 80 | 88.80% | 12 | − | 37261018 | 37261097 | 80 |
| 13 | 62 | 1 | 80 | 80 | 88.80% | 12 | − | 34820817 | 34820896 | 80 |
| 13 | 62 | 1 | 80 | 80 | 88.80% | 12 | − | 34820478 | 34820557 | 80 |
| 13 | 62 | 1 | 80 | 80 | 88.80% | 10 | − | 41839549 | 41839628 | 80 |
| 13 | 60 | 1 | 80 | 80 | 87.50% | 5 | − | 49645410 | 49645489 | 80 |
| 13 | 60 | 1 | 80 | 80 | 87.50% | 5 | − | 49645075 | 49645154 | 80 |
| 13 | 60 | 1 | 80 | 80 | 87.50% | 5 | − | 49642370 | 49642449 | 80 |
| 13 | 60 | 1 | 80 | 80 | 87.50% | 5 | − | 49624745 | 49624824 | 80 |
| 13 | 60 | 1 | 80 | 80 | 87.50% | 16 | − | 38276509 | 38276588 | 80 |
| 13 | 60 | 1 | 80 | 80 | 87.50% | 12 | − | 37266785 | 37266864 | 80 |
| 13 | 60 | 1 | 80 | 80 | 87.50% | 10 | − | 41833965 | 41834044 | 80 |
| 13 | 58 | 1 | 80 | 80 | 86.30% | 5 | − | 49623725 | 49623804 | 80 |
| 13 | 58 | 1 | 80 | 80 | 86.30% | 12 | − | 37252445 | 37252524 | 80 |
| 13 | 57 | 12 | 80 | 80 | 91.40% | 3 | − | 90520385 | 90520453 | 69 |
| 13 | 57 | 12 | 80 | 80 | 91.40% | 12 | − | 34716770 | 34716838 | 69 |
| 13 | 57 | 12 | 80 | 80 | 91.40% | 10 | − | 41835826 | 41835894 | 69 |
| 13 | 56 | 1 | 80 | 80 | 85.00% | 5 | − | 49624405 | 49624484 | 80 |
| 13 | 56 | 1 | 80 | 80 | 85.00% | 12 | − | 37240170 | 37240249 | 80 |
| 13 | 55 | 12 | 80 | 80 | 89.90% | Un_KI270317v1 | − | 36455 | 36523 | 69 |
| 13 | 55 | 12 | 80 | 80 | 89.90% | 5 | − | 49622710 | 49622778 | 69 |
| 13 | 55 | 12 | 80 | 80 | 89.90% | 3 | − | 93710174 | 93710242 | 69 |
| 13 | 55 | 12 | 80 | 80 | 89.90% | 3 | − | 93713063 | 93713131 | 69 |
| 13 | 55 | 12 | 80 | 80 | 89.90% | 3 | − | 91550280 | 91550348 | 69 |
| 13 | 55 | 12 | 80 | 80 | 89.90% | 3 | − | 91549603 | 91549671 | 69 |
| 13 | 55 | 12 | 80 | 80 | 89.90% | 3 | − | 91544163 | 91544231 | 69 |
| 13 | 55 | 12 | 80 | 80 | 89.90% | 3 | − | 90533635 | 90533703 | 69 |
| 13 | 53 | 12 | 80 | 80 | 88.50% | 3 | − | 91282819 | 91282887 | 69 |
| 13 | 53 | 12 | 80 | 80 | 88.50% | 3 | − | 91281485 | 91281553 | 69 |
| 13 | 53 | 12 | 80 | 80 | 88.50% | 3 | − | 90684585 | 90684653 | 69 |
| 13 | 53 | 12 | 80 | 80 | 88.50% | 3 | − | 90678209 | 90678277 | 69 |
| 13 | 53 | 12 | 80 | 80 | 88.50% | 3 | − | 90619678 | 90619746 | 69 |
| 13 | 53 | 12 | 80 | 80 | 88.50% | 3 | − | 90576134 | 90576202 | 69 |
| 13 | 53 | 12 | 80 | 80 | 88.50% | 12 | − | 37261698 | 37261766 | 69 |
| 13 | 53 | 12 | 80 | 80 | 88.50% | 12 | − | 34716089 | 34716157 | 69 |
| 13 | 52 | 12 | 79 | 80 | 88.30% | 5 | − | 49642711 | 49642778 | 68 |
| 13 | 52 | 13 | 80 | 80 | 88.30% | 3 | − | 90605289 | 90605356 | 68 |
| 13 | 52 | 21 | 80 | 80 | 93.40% | 12 | − | 34713030 | 34713089 | 60 |
| 13 | 51 | 12 | 80 | 80 | 87.00% | Un_KI270329v1 | − | 860 | 928 | 69 |
| 13 | 51 | 12 | 80 | 80 | 87.00% | 5 | − | 49643045 | 49643113 | 69 |
| 13 | 51 | 20 | 80 | 80 | 91.90% | 3 | − | 93705595 | 93705655 | 61 |
| 13 | 51 | 20 | 80 | 80 | 91.90% | 3 | − | 93708483 | 93708543 | 61 |
| 13 | 50 | 19 | 80 | 80 | 90.40% | Un_KI270411v1 | − | 318 | 379 | 62 |
| 13 | 50 | 21 | 80 | 80 | 91.70% | 12 | − | 37270326 | 37270385 | 60 |
| 13 | 50 | 21 | 80 | 80 | 91.70% | 12 | − | 34714054 | 34714113 | 60 |
| 13 | 50 | 19 | 80 | 80 | 90.40% | 10 | − | 41840733 | 41840794 | 62 |
| 13 | 49 | 18 | 80 | 80 | 88.90% | 4 | − | 67398697 | 67398759 | 63 |
| 13 | 49 | 18 | 80 | 80 | 88.90% | 12 | − | 34719135 | 34719197 | 63 |
| 13 | 49 | 20 | 80 | 80 | 90.20% | 10 | − | 41838194 | 41838254 | 61 |
| 13 | 48 | 19 | 80 | 80 | 96.20% | Un_KI270411v1 | − | 1335 | 1734 | 400 |
| 13 | 48 | 22 | 80 | 80 | 91.40% | 7 | − | 60884192 | 60884579 | 388 |
| 13 | 48 | 1 | 60 | 80 | 90.00% | 5 | − | 49610120 | 49610179 | 60 |
| 13 | 48 | 21 | 80 | 80 | 90.00% | 12 | − | 34710310 | 34710369 | 60 |
| 13 | 46 | 23 | 80 | 80 | 89.70% | 12 | − | 34711334 | 34711391 | 58 |
| 13 | 45 | 22 | 80 | 80 | 88.20% | Un_KI270366v1 | − | 3484 | 3542 | 59 |
| 13 | 45 | 22 | 80 | 80 | 88.20% | 5_GL000208v1_random | − | 46239 | 46297 | 59 |
| 13 | 44 | 21 | 80 | 80 | 86.70% | 12 | − | 34715075 | 34715134 | 60 |
| 13 | 44 | 25 | 80 | 80 | 89.30% | 10 | − | 41834305 | 41834360 | 56 |
| 13 | 43 | 22 | 80 | 80 | 86.50% | 2 | − | 94509270 | 94509328 | 59 |
| 13 | 34 | 45 | 80 | 80 | 97.30% | 12 | − | 37251709 | 37251744 | 36 |
| 13 | 34 | 45 | 80 | 80 | 97.30% | 12 | − | 34834994 | 34835029 | 36 |
| 13 | 33 | 44 | 80 | 80 | 94.60% | 3 | − | 93715265 | 93715301 | 37 |
| 13 | 33 | 44 | 80 | 80 | 94.60% | 12 | − | 34709971 | 34710007 | 37 |
| 13 | 33 | 21 | 80 | 80 | 97.20% | 10 | − | 41832264 | 41832323 | 60 |
| 13 | 29 | 48 | 80 | 80 | 94.00% | 5 | − | 49617630 | 49617662 | 33 |
| 13 | 27 | 52 | 80 | 80 | 96.60% | Un_KI270312v1 | − | 299 | 327 | 29 |
| 13 | 27 | 52 | 80 | 80 | 96.60% | 5 | − | 49642030 | 49642058 | 29 |
| 13 | 27 | 49 | 80 | 80 | 93.60% | 2 | − | 94522436 | 94522468 | 33 |
| 13 | 24 | 53 | 80 | 80 | 92.90% | 5_GL000208v1_random | − | 47944 | 47971 | 28 |
| 13 | 21 | 21 | 41 | 80 | 100.00% | 12 | − | 34709672 | 34709692 | 21 |
| 14 | 78 | 1 | 80 | 80 | 96.30% | 3 | − | 91550540 | 91550618 | 79 |
| 14 | 78 | 1 | 80 | 80 | 96.30% | 3 | + | 91628162 | 91628240 | 79 |
| 14 | 78 | 1 | 80 | 80 | 96.30% | 3 | + | 91625270 | 91625348 | 79 |
| 14 | 78 | 1 | 80 | 80 | 96.30% | 3 | + | 91622377 | 91622455 | 79 |
| 14 | 78 | 1 | 80 | 80 | 96.30% | 3 | + | 91619486 | 91619564 | 79 |
| 14 | 78 | 1 | 80 | 80 | 96.30% | 3 | + | 91614040 | 91614118 | 79 |
| 14 | 78 | 1 | 80 | 80 | 96.30% | 3 | + | 91611150 | 91611228 | 79 |
| 14 | 78 | 1 | 80 | 80 | 96.30% | 3 | + | 91596692 | 91596770 | 79 |
| 14 | 78 | 1 | 80 | 80 | 96.30% | 3 | + | 91593462 | 91593540 | 79 |
| 14 | 78 | 1 | 80 | 80 | 96.30% | 3 | + | 91585636 | 91585714 | 79 |
| 14 | 78 | 1 | 80 | 80 | 96.30% | 3 | + | 91579851 | 91579929 | 79 |
| 14 | 78 | 1 | 80 | 80 | 96.30% | 3 | + | 91576962 | 91577040 | 79 |
| 14 | 78 | 1 | 80 | 80 | 96.30% | 3 | + | 91574075 | 91574153 | 79 |
| 14 | 78 | 1 | 80 | 80 | 96.30% | 3 | + | 91571181 | 91571259 | 79 |
| 14 | 78 | 1 | 80 | 80 | 96.30% | 3 | + | 91568630 | 91568708 | 79 |
| 14 | 78 | 1 | 80 | 80 | 96.30% | 3 | + | 91565735 | 91565813 | 79 |
| 14 | 78 | 1 | 80 | 80 | 96.30% | 3 | + | 91562841 | 91562919 | 79 |
| 14 | 76 | 1 | 80 | 80 | 95.00% | 3 | − | 91544424 | 91544502 | 79 |
| 14 | 74 | 1 | 80 | 80 | 93.70% | 3 | − | 93713323 | 93713401 | 79 |
| 14 | 74 | 1 | 80 | 80 | 93.70% | 3 | − | 93710434 | 93710512 | 79 |
| 14 | 72 | 1 | 80 | 80 | 92.50% | 3 | − | 93707549 | 93707627 | 79 |
| 14 | 63 | 12 | 80 | 80 | 95.70% | 3 | − | 93707890 | 93707958 | 69 |
| 14 | 63 | 12 | 80 | 80 | 95.70% | 3 | − | 93710775 | 93710843 | 69 |
| 14 | 63 | 12 | 80 | 80 | 95.70% | 3 | − | 91550881 | 91550949 | 69 |
| 14 | 63 | 12 | 80 | 80 | 95.70% | 3 | − | 91542556 | 91542624 | 69 |
| 14 | 63 | 12 | 80 | 80 | 95.70% | 10 | − | 41839808 | 41839876 | 69 |
| 14 | 62 | 12 | 80 | 80 | 97.00% | 10 | − | 41831509 | 41831917 | 409 |
| 14 | 61 | 12 | 80 | 80 | 94.30% | 3 | − | 93706874 | 93706942 | 69 |
| 14 | 61 | 12 | 80 | 80 | 94.30% | 3 | − | 93709757 | 93709825 | 69 |
| 14 | 61 | 12 | 80 | 80 | 94.30% | 3 | − | 93722329 | 93722397 | 69 |
| 14 | 61 | 12 | 80 | 80 | 94.30% | 3 | − | 93723519 | 93723587 | 69 |
| 14 | 61 | 12 | 80 | 80 | 94.30% | 3 | − | 91552750 | 91552818 | 69 |
| 14 | 61 | 12 | 80 | 80 | 94.30% | 3 | − | 91549863 | 91549931 | 69 |
| 14 | 61 | 12 | 80 | 80 | 94.30% | 3 | − | 91544766 | 91544834 | 69 |
| 14 | 61 | 12 | 80 | 80 | 94.30% | 3 | − | 90506095 | 90506163 | 69 |
| 14 | 60 | 12 | 80 | 80 | 95.60% | X | − | 62483966 | 62494319 | 10354 |
| 14 | 60 | 12 | 80 | 80 | 95.60% | X | − | 62494251 | 62500490 | 6240 |
| 14 | 60 | 12 | 80 | 80 | 95.60% | X | − | 62477796 | 62484034 | 6239 |
| 14 | 60 | 12 | 80 | 80 | 95.60% | X | − | 62469571 | 62477864 | 8294 |
| 14 | 60 | 12 | 80 | 80 | 95.60% | X | − | 62465456 | 62469639 | 4184 |
| 14 | 60 | 12 | 80 | 80 | 94.30% | 10 | − | 41834900 | 41835644 | 745 |
| 14 | 59 | 12 | 80 | 80 | 92.80% | 3 | − | 91546981 | 91547049 | 69 |
| 14 | 59 | 12 | 80 | 80 | 92.80% | 3 | − | 91518720 | 91518788 | 69 |
| 14 | 59 | 12 | 80 | 80 | 92.80% | 3 | − | 90597560 | 90597628 | 69 |
| 14 | 57 | 12 | 80 | 80 | 91.40% | 3 | − | 93717220 | 93717288 | 69 |
| 14 | 57 | 12 | 80 | 80 | 91.40% | 3 | − | 93734545 | 93734613 | 69 |
| 14 | 57 | 12 | 80 | 80 | 91.40% | 3 | − | 91526340 | 91526408 | 69 |
| 14 | 57 | 12 | 80 | 80 | 91.40% | 3 | − | 91262029 | 91262097 | 69 |
| 14 | 57 | 12 | 80 | 80 | 91.40% | 3 | − | 90474146 | 90474214 | 69 |
| 14 | 57 | 12 | 80 | 80 | 91.40% | 3 | − | 90443156 | 90443224 | 69 |
| 14 | 57 | 12 | 80 | 80 | 91.40% | 22 | − | 15176371 | 15176439 | 69 |
| 14 | 57 | 12 | 80 | 80 | 92.80% | 11 | − | 48931965 | 48932204 | 240 |
| 14 | 57 | 12 | 80 | 80 | 91.40% | 11 | − | 48926781 | 48926849 | 69 |
| 14 | 57 | 12 | 80 | 80 | 91.40% | 1 | − | 121613914 | 121613982 | 69 |
| 14 | 56 | 17 | 80 | 80 | 93.80% | 3 | − | 90543072 | 90543135 | 64 |
| 14 | 56 | 1 | 80 | 80 | 84.90% | 12 | − | 34715676 | 34715750 | 75 |
| 14 | 56 | 12 | 80 | 80 | 92.50% | 11 | − | 48922681 | 48922750 | 70 |
| 14 | 55 | 13 | 80 | 80 | 91.20% | 9 | − | 60613301 | 60613369 | 69 |
| 14 | 55 | 12 | 80 | 80 | 89.90% | 5_GL000208v1_random | − | 29509 | 29577 | 69 |
| 14 | 55 | 12 | 80 | 80 | 89.90% | 5 | − | 46419536 | 46419604 | 69 |
| 14 | 55 | 12 | 80 | 80 | 92.40% | 22 | − | 15175858 | 15176097 | 240 |
| 14 | 55 | 12 | 80 | 80 | 89.90% | 2 | − | 94533456 | 94533524 | 69 |
| 14 | 55 | 12 | 80 | 80 | 89.90% | 17 | − | 26882914 | 26882982 | 69 |
| 14 | 55 | 12 | 80 | 80 | 89.90% | 15 | − | 19794091 | 19794159 | 69 |
| 14 | 54 | 12 | 80 | 80 | 93.70% | 12 | − | 37254121 | 37254189 | 69 |
| 14 | 53 | 21 | 80 | 80 | 95.00% | 22 | − | 15998115 | 15998345 | 231 |
| 14 | 53 | 12 | 80 | 80 | 88.50% | 20 | − | 30157810 | 30157878 | 69 |
| 14 | 53 | 12 | 80 | 80 | 88.50% | 2 | − | 94506291 | 94506359 | 69 |
| 14 | 53 | 17 | 80 | 80 | 95.00% | 12 | − | 37239415 | 37239645 | 231 |
| 14 | 53 | 12 | 80 | 80 | 88.50% | 11 | − | 48933331 | 48933399 | 69 |
| 14 | 52 | 17 | 80 | 80 | 90.70% | 9 | − | 60598511 | 60598574 | 64 |
| 14 | 52 | 17 | 80 | 80 | 90.70% | 9 | − | 60606501 | 60606564 | 64 |
| 14 | 52 | 17 | 80 | 80 | 90.70% | 9 | − | 60607691 | 60607754 | 64 |
| 14 | 52 | 17 | 80 | 80 | 90.70% | 9 | − | 60622651 | 60622714 | 64 |
| 14 | 52 | 17 | 80 | 80 | 90.70% | 9 | − | 60637966 | 60638029 | 64 |
| 14 | 52 | 21 | 80 | 80 | 93.40% | 14 | − | 18238235 | 18238294 | 60 |
| 14 | 52 | 21 | 80 | 80 | 93.40% | 14 | − | 18240971 | 18241030 | 60 |
| 14 | 51 | 12 | 80 | 80 | 87.00% | 9 | − | 60589661 | 60589729 | 69 |
| 14 | 51 | 12 | 80 | 80 | 87.00% | 5 | − | 47084821 | 47084889 | 69 |
| 14 | 51 | 12 | 80 | 80 | 87.00% | 12 | − | 34831586 | 34831654 | 69 |
| 14 | 50 | 17 | 80 | 80 | 89.10% | 9 | − | 60578771 | 60578834 | 64 |
| 14 | 50 | 17 | 80 | 80 | 89.10% | 9 | − | 60604121 | 60604184 | 64 |
| 14 | 50 | 17 | 80 | 80 | 85.80% | 5 | − | 47090596 | 47090658 | 63 |
| 14 | 50 | 12 | 80 | 80 | 93.20% | 21 | − | 12968466 | 12968705 | 240 |
| 14 | 50 | 17 | 80 | 80 | 89.10% | 17 | − | 25919191 | 25919254 | 64 |
| 14 | 49 | 12 | 80 | 80 | 85.60% | Un_KI270544v1 | − | 436 | 504 | 69 |
| 14 | 47 | 12 | 80 | 80 | 89.90% | 5_GL000208v1_random | − | 15126 | 15194 | 69 |
| 14 | 47 | 12 | 80 | 80 | 84.10% | 5_GL000208v1_random | − | 18760 | 18828 | 69 |
| 14 | 47 | 12 | 80 | 80 | 84.10% | 5 | − | 47095401 | 47095469 | 69 |
| 14 | 47 | 12 | 80 | 80 | 84.10% | 2 | − | 94505266 | 94505334 | 69 |
| 14 | 46 | 12 | 80 | 80 | 92.50% | 2 | − | 94558879 | 94559288 | 410 |
| 14 | 45 | 31 | 80 | 80 | 96.00% | X | − | 58547306 | 58547541 | 236 |
| 14 | 44 | 32 | 80 | 80 | 97.90% | X | − | 62500421 | 62500656 | 236 |
| 14 | 43 | 12 | 56 | 80 | 97.80% | 12 | − | 37687878 | 37687922 | 45 |
| 14 | 43 | 12 | 58 | 80 | 95.80% | 11 | − | 55258171 | 55258217 | 47 |
| 14 | 42 | 37 | 80 | 80 | 97.80% | 12 | − | 34829550 | 34829593 | 44 |
| 14 | 41 | 17 | 58 | 80 | 100.00% | 21 | − | 12970366 | 12970578 | 213 |
| 14 | 40 | 37 | 80 | 80 | 95.50% | 12 | − | 37238395 | 37238438 | 44 |
| 14 | 40 | 37 | 80 | 80 | 95.50% | 12 | − | 37239751 | 37239794 | 44 |
| 14 | 40 | 37 | 80 | 80 | 95.50% | 12 | − | 37240771 | 37240814 | 44 |
| 14 | 38 | 35 | 80 | 80 | 91.40% | 5 | − | 49622631 | 49622676 | 46 |
| 14 | 36 | 35 | 80 | 80 | 89.20% | Un_KI270366v1 | − | 6813 | 6858 | 46 |
| 14 | 36 | 17 | 56 | 80 | 95.00% | 22_KI270739v1_random | − | 31269 | 31308 | 40 |
| 14 | 31 | 17 | 48 | 80 | 100.00% | 22 | − | 15163093 | 15163466 | 374 |
| 15 | 80 | 1 | 80 | 80 | 100.00% | 3 | − | 93712242 | 93712321 | 80 |
| 15 | 80 | 1 | 80 | 80 | 100.00% | 3 | − | 93706469 | 93706548 | 80 |
| 15 | 80 | 1 | 80 | 80 | 100.00% | 3 | + | 91685209 | 91685288 | 80 |
| 15 | 80 | 1 | 80 | 80 | 100.00% | 3 | + | 91670755 | 91670834 | 80 |
| 15 | 80 | 1 | 80 | 80 | 100.00% | 3 | + | 91664971 | 91665050 | 80 |
| 15 | 80 | 1 | 80 | 80 | 100.00% | 3 | + | 91659524 | 91659603 | 80 |
| 15 | 80 | 1 | 80 | 80 | 100.00% | 3 | + | 91656628 | 91656707 | 80 |
| 15 | 80 | 1 | 80 | 80 | 100.00% | 3 | + | 91653734 | 91653813 | 80 |
| 15 | 80 | 1 | 80 | 80 | 100.00% | 3 | + | 91639610 | 91639689 | 80 |
| 15 | 80 | 1 | 80 | 80 | 100.00% | 3 | + | 91632131 | 91632210 | 80 |
| 15 | 80 | 1 | 80 | 80 | 100.00% | 3 | + | 91609339 | 91609418 | 80 |
| 15 | 80 | 1 | 80 | 80 | 100.00% | 3 | + | 91606449 | 91606528 | 80 |
| 15 | 80 | 1 | 80 | 80 | 100.00% | 3 | + | 91591651 | 91591730 | 80 |
| 15 | 80 | 1 | 80 | 80 | 100.00% | 3 | + | 91583825 | 91583904 | 80 |
| 15 | 80 | 1 | 80 | 80 | 100.00% | 3 | + | 91578043 | 91578122 | 80 |
| 15 | 80 | 1 | 80 | 80 | 100.00% | 3 | + | 91572264 | 91572343 | 80 |
| 15 | 80 | 1 | 80 | 80 | 100.00% | 3 | + | 91563923 | 91564002 | 80 |
| 15 | 80 | 1 | 80 | 80 | 100.00% | 3 | + | 91558474 | 91558553 | 80 |
| 15 | 78 | 1 | 80 | 80 | 98.80% | 3 | − | 91549458 | 91549537 | 80 |
| 15 | 78 | 1 | 80 | 80 | 96.30% | 3 | + | 93142761 | 93142839 | 79 |
| 15 | 78 | 1 | 80 | 80 | 96.30% | 3 | + | 93208255 | 93208333 | 79 |
| 15 | 76 | 1 | 80 | 80 | 97.50% | 3 | − | 91544018 | 91544097 | 80 |
| 15 | 75 | 1 | 80 | 80 | 97.50% | 3 | − | 91552346 | 91552763 | 418 |
| 15 | 74 | 5 | 80 | 80 | 96.00% | 3 | − | 93709357 | 93709431 | 75 |
| 15 | 73 | 1 | 80 | 80 | 96.30% | 3 | − | 91546915 | 91548518 | 1604 |
| 15 | 72 | 1 | 80 | 80 | 96.30% | 3 | − | 91544700 | 91546994 | 2295 |
| 15 | 62 | 1 | 80 | 80 | 87.20% | 3 | − | 93707825 | 93707903 | 79 |
| 15 | 62 | 1 | 80 | 80 | 87.20% | 3 | − | 93710710 | 93710788 | 79 |
| 15 | 62 | 1 | 80 | 80 | 87.20% | 3 | − | 91550816 | 91550894 | 79 |
| 15 | 62 | 1 | 80 | 80 | 88.80% | 3 | − | 91551327 | 91551406 | 80 |
| 15 | 57 | 1 | 80 | 80 | 89.20% | 3 | − | 91541819 | 91544779 | 2961 |
| 15 | 51 | 1 | 74 | 80 | 89.60% | 4 | − | 67399917 | 67400330 | 414 |
| 15 | 50 | 1 | 80 | 80 | 83.40% | 12 | − | 37236973 | 37237050 | 78 |
| 15 | 50 | 1 | 80 | 80 | 82.70% | 12 | − | 34833778 | 34833855 | 78 |
| 15 | 49 | 1 | 80 | 80 | 82.40% | 12 | − | 37254397 | 37254474 | 78 |
| 15 | 49 | 1 | 80 | 80 | 83.10% | 12 | − | 37262573 | 37262650 | 78 |
| 15 | 48 | 1 | 80 | 80 | 81.20% | 5 | − | 49643913 | 49643990 | 78 |
| 15 | 48 | 1 | 80 | 80 | 81.20% | 5 | − | 49622567 | 49622644 | 78 |
| 15 | 48 | 1 | 80 | 80 | 81.20% | 5 | − | 49618507 | 49618584 | 78 |
| 15 | 48 | 1 | 80 | 80 | 81.20% | 5 | − | 49615448 | 49615525 | 78 |
| 15 | 48 | 2 | 80 | 80 | 82.40% | 3 | − | 91545556 | 91545633 | 78 |
| 15 | 48 | 1 | 80 | 80 | 81.20% | 16 | − | 38267888 | 38267965 | 78 |
| 15 | 48 | 1 | 80 | 80 | 86.80% | 12 | − | 37263592 | 37265025 | 1434 |
| 15 | 48 | 1 | 80 | 80 | 81.90% | 12 | − | 37240367 | 37240444 | 78 |
| 15 | 48 | 1 | 80 | 80 | 81.90% | 12 | − | 37239011 | 37239088 | 78 |
| 15 | 48 | 1 | 80 | 80 | 81.90% | 12 | − | 37235613 | 37235690 | 78 |
| 15 | 47 | 1 | 80 | 80 | 80.90% | Un_KI270317v1 | − | 36652 | 36729 | 78 |
| 15 | 47 | 1 | 80 | 80 | 81.60% | 12 | − | 37264608 | 37264685 | 78 |
| 15 | 46 | 1 | 80 | 80 | 79.80% | Un_KI270304v1 | − | 1538 | 1615 | 78 |
| 15 | 46 | 1 | 80 | 80 | 80.40% | 12 | − | 37238331 | 37238408 | 78 |
| 15 | 45 | 1 | 80 | 80 | 79.50% | 5 | − | 49618847 | 49618924 | 78 |
| 15 | 45 | 1 | 80 | 80 | 80.00% | 5 | − | 49617148 | 49617225 | 78 |
| 15 | 43 | 1 | 80 | 80 | 78.00% | 5 | − | 49645267 | 49645344 | 78 |
| 15 | 43 | 1 | 80 | 80 | 78.00% | 5 | − | 49643237 | 49643314 | 78 |
| 15 | 43 | 12 | 80 | 80 | 82.80% | 5 | − | 49616468 | 49616534 | 67 |
| 15 | 43 | 12 | 80 | 80 | 82.80% | 5 | − | 49615788 | 49615854 | 67 |
| 15 | 43 | 12 | 80 | 80 | 82.80% | 12 | − | 37260203 | 37260269 | 67 |
| 15 | 41 | 12 | 80 | 80 | 81.10% | 5 | − | 49623582 | 49623648 | 67 |
| 15 | 41 | 1 | 55 | 80 | 87.30% | 12 | − | 34831545 | 34831599 | 55 |
| 15 | 40 | 12 | 80 | 80 | 81.50% | 5 | − | 49624262 | 49624328 | 67 |
| 15 | 37 | 1 | 60 | 80 | 93.10% | 3 | − | 91546934 | 91550214 | 3281 |
| 15 | 36 | 12 | 55 | 80 | 91.00% | 3 | − | 93715815 | 93715858 | 44 |
| 15 | 35 | 15 | 80 | 80 | 78.50% | Un_KI270304v1 | − | 1198 | 1261 | 64 |
| 15 | 35 | 1 | 60 | 80 | 90.70% | 3 | − | 91544719 | 91546649 | 1931 |
| 15 | 24 | 1 | 26 | 80 | 96.20% | 3 | − | 90650781 | 90650806 | 26 |
| 15 | 24 | 1 | 26 | 80 | 96.20% | 3 | − | 90504411 | 90504436 | 26 |
| 15 | 22 | 1 | 26 | 80 | 92.40% | Un_KI270317v1 | − | 36364 | 36389 | 26 |
| 15 | 22 | 1 | 26 | 80 | 92.40% | Un_KI270310v1 | − | 850 | 875 | 26 |
| 15 | 22 | 1 | 26 | 80 | 92.40% | Un_KI270304v1 | − | 910 | 935 | 26 |
| 15 | 22 | 1 | 26 | 80 | 92.40% | 3 | − | 93707200 | 93707225 | 26 |
| 15 | 22 | 1 | 26 | 80 | 92.40% | 3 | − | 90594319 | 90594344 | 26 |
| 15 | 22 | 1 | 26 | 80 | 92.40% | 12 | − | 37267374 | 37267399 | 26 |
| 15 | 22 | 1 | 26 | 80 | 92.40% | 12 | − | 37259915 | 37259940 | 26 |
| 15 | 20 | 27 | 46 | 80 | 100.00% | 8 | − | 77927625 | 77927644 | 20 |
| 15 | 20 | 1 | 26 | 80 | 88.50% | 3 | − | 93713990 | 93714015 | 26 |
| 15 | 20 | 1 | 26 | 80 | 88.50% | 3 | − | 90492644 | 90492669 | 26 |
| 15 | 20 | 27 | 46 | 80 | 100.00% | 2 | − | 123296087 | 123296106 | 20 |
| 15 | 20 | 3 | 26 | 80 | 91.70% | 12 | − | 34719384 | 34719407 | 24 |
| 16 | 78 | 1 | 80 | 80 | 98.80% | 3 | + | 91664456 | 91664535 | 80 |
| 16 | 78 | 1 | 80 | 80 | 98.80% | 3 | + | 91653219 | 91653298 | 80 |
| 16 | 78 | 1 | 80 | 80 | 98.80% | 3 | + | 91631616 | 91631695 | 80 |
| 16 | 78 | 1 | 80 | 80 | 98.80% | 3 | + | 91628728 | 91628807 | 80 |
| 16 | 78 | 1 | 80 | 80 | 98.80% | 3 | + | 91625836 | 91625915 | 80 |
| 16 | 78 | 1 | 80 | 80 | 98.80% | 3 | + | 91622943 | 91623022 | 80 |
| 16 | 78 | 1 | 80 | 80 | 98.80% | 3 | + | 91611716 | 91611795 | 80 |
| 16 | 78 | 1 | 80 | 80 | 98.80% | 3 | + | 91608824 | 91608903 | 80 |
| 16 | 78 | 1 | 80 | 80 | 98.80% | 3 | + | 91605934 | 91606013 | 80 |
| 16 | 78 | 1 | 80 | 80 | 98.80% | 3 | + | 91600149 | 91600228 | 80 |
| 16 | 78 | 1 | 80 | 80 | 98.80% | 3 | + | 91597258 | 91597337 | 80 |
| 16 | 78 | 1 | 80 | 80 | 98.80% | 3 | + | 91594028 | 91594107 | 80 |
| 16 | 78 | 1 | 80 | 80 | 98.80% | 3 | + | 91591136 | 91591215 | 80 |
| 16 | 78 | 1 | 80 | 80 | 98.80% | 3 | + | 91589093 | 91589172 | 80 |
| 16 | 78 | 1 | 80 | 80 | 98.80% | 3 | + | 91574641 | 91574720 | 80 |
| 16 | 78 | 1 | 80 | 80 | 98.80% | 3 | + | 91569196 | 91569275 | 80 |
| 16 | 76 | 1 | 80 | 80 | 97.50% | 3 | − | 91549973 | 91550052 | 80 |
| 16 | 72 | 1 | 80 | 80 | 95.00% | 3 | − | 93713772 | 93713851 | 80 |
| 16 | 72 | 1 | 80 | 80 | 95.00% | 3 | − | 91552860 | 91552939 | 80 |
| 16 | 65 | 12 | 80 | 80 | 97.20% | 3 | − | 93706984 | 93707052 | 69 |
| 16 | 65 | 12 | 80 | 80 | 97.20% | 3 | − | 93709867 | 93709935 | 69 |
| 16 | 65 | 12 | 80 | 80 | 97.20% | 3 | − | 93712757 | 93712825 | 69 |
| 16 | 62 | 9 | 80 | 80 | 90.20% | 10 | − | 41841443 | 41841513 | 71 |
| 16 | 62 | 9 | 80 | 80 | 93.10% | 10 | − | 41839918 | 41839989 | 72 |
| 16 | 60 | 9 | 80 | 80 | 91.70% | 5 | − | 49624776 | 49624847 | 72 |
| 16 | 60 | 9 | 80 | 80 | 91.70% | 3 | − | 91543178 | 91543249 | 72 |
| 16 | 59 | 10 | 80 | 80 | 91.60% | 3 | − | 90606335 | 90606405 | 71 |
| 16 | 59 | 12 | 80 | 80 | 92.80% | 12 | − | 37258622 | 37258690 | 69 |
| 16 | 58 | 9 | 80 | 80 | 90.30% | 3 | − | 93708514 | 93708585 | 72 |
| 16 | 58 | 9 | 80 | 80 | 90.30% | 3 | − | 93711399 | 93711470 | 72 |
| 16 | 58 | 9 | 80 | 80 | 90.30% | 3 | − | 91545390 | 91545461 | 72 |
| 16 | 58 | 13 | 80 | 80 | 92.70% | 12 | − | 37246313 | 37246380 | 68 |
| 16 | 58 | 13 | 80 | 80 | 92.70% | 12 | − | 37239861 | 37239928 | 68 |
| 16 | 58 | 13 | 80 | 80 | 92.70% | 12 | − | 37238505 | 37238572 | 68 |
| 16 | 58 | 13 | 80 | 80 | 92.70% | 12 | − | 37237827 | 37237894 | 68 |
| 16 | 58 | 13 | 80 | 80 | 92.70% | 12 | − | 37236467 | 37236534 | 68 |
| 16 | 58 | 13 | 80 | 80 | 92.70% | 12 | − | 34831017 | 34831084 | 68 |
| 16 | 58 | 9 | 80 | 80 | 90.30% | 12 | − | 34715782 | 34715853 | 72 |
| 16 | 58 | 9 | 80 | 80 | 90.30% | 10 | − | 41832130 | 41832201 | 72 |
| 16 | 57 | 10 | 80 | 80 | 90.20% | 5 | − | 46418963 | 46419033 | 71 |
| 16 | 57 | 10 | 80 | 80 | 90.20% | 3 | − | 90709152 | 90709222 | 71 |
| 16 | 57 | 10 | 80 | 80 | 90.20% | 3 | − | 90683428 | 90683498 | 71 |
| 16 | 57 | 12 | 80 | 80 | 91.40% | 3 | − | 90509598 | 90509666 | 69 |
| 16 | 57 | 10 | 80 | 80 | 90.20% | 3 | − | 90507553 | 90507623 | 71 |
| 16 | 57 | 10 | 80 | 80 | 90.20% | 3 | − | 90501616 | 90501686 | 71 |
| 16 | 57 | 10 | 80 | 80 | 90.20% | 3 | − | 90494473 | 90494543 | 71 |
| 16 | 56 | 9 | 80 | 80 | 88.90% | 3 | − | 91551505 | 91551576 | 72 |
| 16 | 56 | 9 | 80 | 80 | 88.90% | 3 | − | 91520000 | 91520071 | 72 |
| 16 | 56 | 11 | 80 | 80 | 90.00% | 12 | − | 37257943 | 37258012 | 70 |
| 16 | 56 | 13 | 80 | 80 | 91.20% | 12 | − | 34829660 | 34829727 | 68 |
| 16 | 56 | 13 | 80 | 80 | 91.20% | 12 | − | 34822207 | 34822274 | 68 |
| 16 | 56 | 13 | 80 | 80 | 91.20% | 12 | − | 34821867 | 34821934 | 68 |
| 16 | 56 | 13 | 80 | 80 | 91.20% | 10 | − | 41840764 | 41840831 | 68 |
| 16 | 55 | 10 | 80 | 80 | 88.80% | Un_KI270366v1 | − | 7425 | 7495 | 71 |
| 16 | 55 | 10 | 80 | 80 | 88.80% | 5_GL000208v1_random | − | 56663 | 56733 | 71 |
| 16 | 55 | 10 | 80 | 80 | 88.80% | 3 | − | 90564638 | 90564708 | 71 |
| 16 | 55 | 10 | 80 | 80 | 88.80% | 3 | − | 90559218 | 90559288 | 71 |
| 16 | 55 | 10 | 80 | 80 | 88.80% | 3 | − | 90498208 | 90498278 | 71 |
| 16 | 55 | 17 | 80 | 80 | 93.80% | 12 | − | 37263766 | 37263830 | 65 |
| 16 | 55 | 13 | 77 | 80 | 92.40% | 12 | − | 37260040 | 37260104 | 65 |
| 16 | 55 | 18 | 80 | 80 | 93.70% | 12 | − | 37252136 | 37252198 | 63 |
| 16 | 55 | 18 | 80 | 80 | 93.70% | 10 | − | 41839580 | 41839642 | 63 |
| 16 | 54 | 18 | 77 | 80 | 95.00% | 12 | − | 37261052 | 37261111 | 60 |
| 16 | 54 | 18 | 80 | 80 | 93.70% | 12 | − | 34716060 | 34716182 | 123 |
| 16 | 53 | 17 | 80 | 80 | 92.20% | 12 | − | 37235447 | 37235511 | 65 |
| 16 | 53 | 17 | 80 | 80 | 92.20% | 12 | − | 37236807 | 37236871 | 65 |
| 16 | 53 | 18 | 80 | 80 | 92.10% | 12 | − | 37260713 | 37260775 | 63 |
| 16 | 53 | 18 | 80 | 80 | 92.10% | 12 | − | 37259018 | 37259080 | 63 |
| 16 | 53 | 17 | 78 | 80 | 93.60% | 12 | − | 34831358 | 34831420 | 63 |
| 16 | 52 | 13 | 80 | 80 | 90.70% | 12 | − | 34710341 | 34710750 | 410 |
| 16 | 51 | 18 | 80 | 80 | 90.50% | 2 | − | 94532711 | 94532773 | 63 |
| 16 | 51 | 17 | 80 | 80 | 90.70% | 12 | − | 37238845 | 37238909 | 65 |
| 16 | 51 | 18 | 80 | 80 | 90.50% | 10 | − | 41842122 | 41842184 | 63 |
| 16 | 49 | 18 | 80 | 80 | 88.90% | 5_GL000208v1_random | − | 10153 | 10215 | 63 |
| 16 | 49 | 18 | 80 | 80 | 85.50% | 5 | − | 47102206 | 47102267 | 62 |
| 16 | 49 | 18 | 80 | 80 | 88.90% | 22 | − | 16039978 | 16040040 | 63 |
| 16 | 49 | 20 | 80 | 80 | 90.20% | 12 | − | 34833612 | 34833672 | 61 |
| 16 | 47 | 22 | 80 | 80 | 89.90% | 5 | − | 46417260 | 46417318 | 59 |
| 16 | 46 | 23 | 80 | 80 | 89.70% | 5 | − | 46345090 | 46345147 | 58 |
| 16 | 42 | 35 | 80 | 80 | 95.70% | Un_KI270362v1 | − | 2841 | 2886 | 46 |
| 16 | 41 | 18 | 64 | 80 | 93.70% | 3 | − | 93710560 | 93710606 | 47 |
| 16 | 39 | 35 | 80 | 80 | 97.60% | 5 | − | 50126203 | 50126419 | 217 |
| 16 | 39 | 36 | 80 | 80 | 93.40% | 5 | − | 50112923 | 50112967 | 45 |
| 16 | 38 | 35 | 80 | 80 | 91.40% | 3 | − | 93724825 | 93724870 | 46 |
| 16 | 37 | 34 | 80 | 80 | 89.40% | 20 | − | 30166485 | 30166531 | 47 |
| 16 | 37 | 34 | 80 | 80 | 89.40% | 15 | − | 19788920 | 19788966 | 47 |
| 16 | 36 | 35 | 80 | 80 | 89.20% | 5_GL000208v1_random | − | 9643 | 9688 | 46 |
| 16 | 36 | 35 | 80 | 80 | 95.00% | 20 | − | 30967419 | 30967974 | 556 |
| 16 | 36 | 33 | 74 | 80 | 92.90% | 10 | − | 41832639 | 41832680 | 42 |
| 16 | 34 | 35 | 80 | 80 | 87.00% | 2 | − | 94519233 | 94519278 | 46 |
| 16 | 28 | 18 | 47 | 80 | 96.70% | 12 | − | 34834381 | 34834410 | 30 |
| 16 | 27 | 53 | 80 | 80 | 100.00% | 1 | − | 121857727 | 121858094 | 368 |
| 16 | 24 | 18 | 47 | 80 | 90.00% | 9 | − | 60574320 | 60574349 | 30 |
| 16 | 23 | 53 | 80 | 80 | 92.60% | 1 | − | 121975266 | 121975294 | 29 |
| 16 | 22 | 52 | 77 | 80 | 92.40% | 12 | − | 34834689 | 34834714 | 26 |
| 17 | 80 | 1 | 80 | 80 | 100.00% | 3 | + | 91941787 | 91941866 | 80 |
| 17 | 80 | 1 | 80 | 80 | 100.00% | 3 | + | 91921547 | 91921626 | 80 |
| 17 | 80 | 1 | 80 | 80 | 100.00% | 3 | + | 91910997 | 91911076 | 80 |
| 17 | 80 | 1 | 80 | 80 | 100.00% | 3 | + | 91853592 | 91853671 | 80 |
| 17 | 80 | 1 | 80 | 80 | 100.00% | 3 | + | 91807997 | 91808076 | 80 |
| 17 | 80 | 1 | 80 | 80 | 100.00% | 3 | + | 91799327 | 91799406 | 80 |
| 17 | 80 | 1 | 80 | 80 | 100.00% | 3 | + | 91746937 | 91747016 | 80 |
| 17 | 80 | 1 | 80 | 80 | 100.00% | 3 | + | 91727032 | 91727111 | 80 |
| 17 | 80 | 1 | 80 | 80 | 100.00% | 3 | + | 91703897 | 91703976 | 80 |
| 17 | 80 | 1 | 80 | 80 | 100.00% | 3 | + | 91694702 | 91694781 | 80 |
| 17 | 80 | 1 | 80 | 80 | 100.00% | 3 | + | 91683137 | 91683216 | 80 |
| 17 | 80 | 1 | 80 | 80 | 100.00% | 3 | + | 91613047 | 91613126 | 80 |
| 17 | 80 | 1 | 80 | 80 | 100.00% | 3 | + | 91598592 | 91598671 | 80 |
| 17 | 80 | 1 | 80 | 80 | 100.00% | 3 | + | 91595362 | 91595441 | 80 |
| 17 | 80 | 1 | 80 | 80 | 100.00% | 3 | + | 91573083 | 91573162 | 80 |
| 17 | 80 | 1 | 80 | 80 | 100.00% | 3 | + | 91559293 | 91559372 | 80 |
| 17 | 75 | 1 | 80 | 80 | 97.50% | 3 | − | 93711424 | 93711504 | 81 |
| 17 | 75 | 1 | 80 | 80 | 97.50% | 3 | − | 93708539 | 93708619 | 81 |
| 17 | 75 | 1 | 80 | 80 | 97.50% | 3 | − | 93705651 | 93705731 | 81 |
| 17 | 73 | 1 | 80 | 80 | 96.30% | 3 | − | 91545415 | 91545495 | 81 |
| 17 | 73 | 1 | 80 | 80 | 96.30% | 3 | − | 91543203 | 91543283 | 81 |
| 17 | 72 | 1 | 80 | 80 | 96.30% | 3 | − | 91547628 | 91548720 | 1093 |
| 17 | 71 | 1 | 80 | 80 | 95.00% | 3 | − | 93714472 | 93716075 | 1604 |
| 17 | 69 | 1 | 80 | 80 | 93.80% | 3 | − | 91548640 | 91549739 | 1100 |
| 17 | 68 | 1 | 74 | 80 | 97.30% | 16 | − | 38266052 | 38268848 | 2797 |
| 17 | 67 | 1 | 80 | 80 | 92.50% | 5 | − | 49631511 | 49631591 | 81 |
| 17 | 67 | 1 | 80 | 80 | 97.30% | 3 | − | 91551530 | 91553302 | 1773 |
| 17 | 67 | 1 | 80 | 80 | 92.50% | 12 | − | 37265483 | 37265563 | 81 |
| 17 | 67 | 1 | 80 | 80 | 92.50% | 12 | − | 34715472 | 34715887 | 416 |
| 17 | 67 | 1 | 80 | 80 | 92.50% | 12 | − | 34832619 | 34832699 | 81 |
| 17 | 67 | 1 | 80 | 80 | 92.50% | 10 | − | 41839943 | 41840023 | 81 |
| 17 | 66 | 1 | 80 | 80 | 91.30% | 10 | − | 41841468 | 41841547 | 80 |
| 17 | 65 | 1 | 80 | 80 | 91.30% | 5 | − | 49610156 | 49610576 | 421 |
| 17 | 65 | 1 | 80 | 80 | 91.20% | 5 | − | 49632528 | 49632608 | 81 |
| 17 | 64 | 1 | 80 | 80 | 91.10% | 3 | − | 91552546 | 91552626 | 81 |
| 17 | 63 | 1 | 80 | 80 | 90.00% | 12 | − | 37238530 | 37238610 | 81 |
| 17 | 62 | 1 | 80 | 80 | 91.90% | 5 | − | 49625480 | 49625560 | 81 |
| 17 | 62 | 1 | 80 | 80 | 91.90% | 16 | − | 38276904 | 38276984 | 81 |
| 17 | 62 | 1 | 73 | 80 | 93.20% | 16 | − | 38275892 | 38275965 | 74 |
| 17 | 62 | 1 | 73 | 80 | 93.20% | 16 | − | 38267074 | 38267147 | 74 |
| 17 | 61 | 1 | 74 | 80 | 91.90% | 5 | − | 49646145 | 49646219 | 75 |
| 17 | 61 | 1 | 74 | 80 | 91.90% | 5 | − | 49644118 | 49644192 | 75 |
| 17 | 61 | 1 | 74 | 80 | 91.90% | 5 | − | 49630838 | 49630912 | 75 |
| 17 | 61 | 1 | 74 | 80 | 91.90% | 5 | − | 49623787 | 49623861 | 75 |
| 17 | 61 | 1 | 74 | 80 | 91.90% | 5 | − | 49617013 | 49617087 | 75 |
| 17 | 61 | 1 | 74 | 80 | 91.90% | 5 | − | 49614973 | 49615047 | 75 |
| 17 | 61 | 1 | 74 | 80 | 91.90% | 5 | − | 49611520 | 49611594 | 75 |
| 17 | 61 | 1 | 80 | 80 | 88.80% | 5 | − | 49610834 | 49610914 | 81 |
| 17 | 61 | 1 | 80 | 80 | 91.80% | 16 | − | 38277919 | 38277999 | 81 |
| 17 | 61 | 1 | 74 | 80 | 91.90% | 16 | − | 38276231 | 38276305 | 75 |
| 17 | 61 | 1 | 80 | 80 | 88.80% | 12 | − | 34829685 | 34829765 | 81 |
| 17 | 61 | 1 | 80 | 80 | 88.80% | 10 | − | 41841128 | 41841208 | 81 |
| 17 | 60 | 1 | 74 | 80 | 94.20% | Un_KI270317v1 | − | 37196 | 37270 | 75 |
| 17 | 60 | 1 | 74 | 80 | 91.80% | Un_KI270317v1 | − | 795 | 869 | 75 |
| 17 | 60 | 1 | 80 | 80 | 90.60% | 10 | − | 41839605 | 41839685 | 81 |
| 17 | 60 | 1 | 79 | 80 | 88.70% | 10 | − | 41833512 | 41833591 | 80 |
| 17 | 59 | 1 | 80 | 80 | 87.50% | Un_KI270411v1 | − | 1051 | 1131 | 81 |
| 17 | 59 | 1 | 74 | 80 | 90.60% | Un_KI270304v1 | − | 723 | 797 | 75 |
| 17 | 59 | 1 | 74 | 80 | 90.60% | 5 | − | 49643782 | 49643856 | 75 |
| 17 | 59 | 1 | 80 | 80 | 87.50% | 5 | − | 49625140 | 49625220 | 81 |
| 17 | 59 | 1 | 74 | 80 | 90.60% | 5 | − | 49622432 | 49622506 | 75 |
| 17 | 59 | 1 | 74 | 80 | 90.60% | 5 | − | 49615653 | 49615727 | 75 |
| 17 | 59 | 1 | 72 | 80 | 95.40% | 3 | − | 91543547 | 91547707 | 4161 |
| 17 | 59 | 1 | 72 | 80 | 91.70% | 3 | − | 91544227 | 91544299 | 73 |
| 17 | 59 | 1 | 74 | 80 | 90.60% | 16 | − | 38276571 | 38276645 | 75 |
| 17 | 58 | 1 | 80 | 80 | 88.20% | 10 | − | 41832155 | 41837819 | 5665 |
| 17 | 57 | 1 | 72 | 80 | 90.30% | 3 | − | 93706678 | 93706750 | 73 |
| 17 | 57 | 1 | 74 | 80 | 89.20% | 3 | − | 90499941 | 90500015 | 75 |
| 17 | 56 | 1 | 80 | 80 | 92.50% | Un_KI270303v1 | − | 808 | 888 | 81 |
| 17 | 56 | 1 | 71 | 80 | 90.20% | 3 | − | 91546440 | 91546511 | 72 |
| 17 | 55 | 1 | 74 | 80 | 87.90% | 16 | − | 38279624 | 38279698 | 75 |
| 17 | 54 | 1 | 71 | 80 | 88.80% | 1 | − | 122462723 | 122462794 | 72 |
| 17 | 54 | 1 | 71 | 80 | 88.80% | 1 | − | 122496505 | 122496576 | 72 |
| 17 | 52 | 1 | 74 | 80 | 92.00% | Un_KI270304v1 | − | 1403 | 1477 | 75 |
| 17 | 48 | 1 | 76 | 80 | 82.90% | 7 | − | 60884581 | 60884814 | 234 |
| 17 | 45 | 21 | 80 | 80 | 88.40% | 4 | − | 67400112 | 67400172 | 61 |
| 17 | 45 | 1 | 80 | 80 | 92.50% | 16 | − | 38268768 | 38280038 | 11271 |
| 17 | 45 | 1 | 80 | 80 | 92.50% | 16 | − | 38268427 | 38268508 | 82 |
| 17 | 42 | 1 | 57 | 80 | 95.80% | 3 | − | 91535155 | 91535725 | 571 |
| 17 | 40 | 38 | 80 | 80 | 97.70% | 12 | − | 37251765 | 37251808 | 44 |
| 17 | 40 | 38 | 80 | 80 | 97.70% | 12 | − | 34835050 | 34835093 | 44 |
| 17 | 36 | 32 | 74 | 80 | 93.10% | 7 | − | 57889049 | 57889433 | 385 |
| 17 | 34 | 43 | 80 | 80 | 94.80% | 5 | − | 46416945 | 46416982 | 38 |
| 17 | 34 | 32 | 72 | 80 | 92.50% | 3 | − | 91549667 | 91551579 | 1913 |
| 17 | 34 | 32 | 72 | 80 | 91.70% | 3 | − | 91551877 | 91551916 | 40 |
| 17 | 34 | 43 | 80 | 80 | 94.80% | 3 | − | 90490295 | 90490332 | 38 |
| 17 | 34 | 43 | 80 | 80 | 94.80% | 12 | − | 34716145 | 34716182 | 38 |
| 17 | 32 | 36 | 74 | 80 | 92.40% | 7 | − | 57993147 | 57993186 | 40 |
| 17 | 32 | 43 | 76 | 80 | 97.10% | 11 | − | 55207299 | 55207332 | 34 |
| 17 | 30 | 43 | 74 | 80 | 96.90% | 3 | − | 90288971 | 90289002 | 32 |
| 17 | 30 | 43 | 74 | 80 | 96.90% | 3 | − | 90635303 | 90635334 | 32 |
| 17 | 30 | 43 | 74 | 80 | 96.90% | 10 | − | 39361121 | 39361152 | 32 |
| 17 | 30 | 43 | 74 | 80 | 96.90% | 10 | − | 39361636 | 39361667 | 32 |
| 17 | 29 | 43 | 73 | 80 | 96.80% | 3 | − | 93716002 | 93716032 | 31 |
| 17 | 28 | 43 | 74 | 80 | 93.80% | 3 | − | 90378865 | 90378896 | 32 |
| 17 | 27 | 46 | 72 | 80 | 100.00% | 3 | − | 91552893 | 91552919 | 27 |
| 17 | 26 | 43 | 74 | 80 | 90.70% | 12 | − | 37356881 | 37356912 | 32 |
| 17 | 26 | 43 | 74 | 80 | 90.70% | 12 | − | 37675195 | 37675226 | 32 |
| 17 | 26 | 43 | 71 | 80 | 96.60% | 10 | − | 39353040 | 39353240 | 201 |
| 17 | 25 | 43 | 67 | 80 | 100.00% | 16 | − | 38279971 | 38279995 | 25 |
| 17 | 23 | 47 | 71 | 80 | 96.00% | 10 | − | 41837748 | 41837772 | 25 |
| 17 | 22 | 51 | 72 | 80 | 100.00% | 3 | − | 91547972 | 91547993 | 22 |
| 18 | 75 | 4 | 80 | 80 | 98.80% | 3 | + | 91673085 | 91673161 | 77 |
| 18 | 75 | 4 | 80 | 80 | 98.80% | 3 | + | 91631570 | 91631646 | 77 |
| 18 | 75 | 4 | 80 | 80 | 98.80% | 3 | + | 91628682 | 91628758 | 77 |
| 18 | 75 | 4 | 80 | 80 | 98.80% | 3 | + | 91622897 | 91622973 | 77 |
| 18 | 75 | 4 | 80 | 80 | 98.80% | 3 | + | 91617114 | 91617190 | 77 |
| 18 | 75 | 4 | 80 | 80 | 98.80% | 3 | + | 91611670 | 91611746 | 77 |
| 18 | 75 | 4 | 80 | 80 | 98.80% | 3 | + | 91608778 | 91608854 | 77 |
| 18 | 75 | 4 | 80 | 80 | 98.80% | 3 | + | 91605888 | 91605964 | 77 |
| 18 | 75 | 4 | 80 | 80 | 98.80% | 3 | + | 91600103 | 91600179 | 77 |
| 18 | 75 | 4 | 80 | 80 | 98.80% | 3 | + | 91597212 | 91597288 | 77 |
| 18 | 75 | 4 | 80 | 80 | 98.80% | 3 | + | 91593982 | 91594058 | 77 |
| 18 | 75 | 4 | 80 | 80 | 98.80% | 3 | + | 91591090 | 91591166 | 77 |
| 18 | 75 | 4 | 80 | 80 | 98.80% | 3 | + | 91589047 | 91589123 | 77 |
| 18 | 75 | 4 | 80 | 80 | 98.80% | 3 | + | 91574595 | 91574671 | 77 |
| 18 | 75 | 4 | 80 | 80 | 98.80% | 3 | + | 91569150 | 91569226 | 77 |
| 18 | 75 | 4 | 80 | 80 | 98.80% | 3 | + | 91566255 | 91566331 | 77 |
| 18 | 73 | 4 | 80 | 80 | 97.50% | 3 | − | 91552909 | 91552985 | 77 |
| 18 | 73 | 4 | 80 | 80 | 97.50% | 3 | − | 91550022 | 91550098 | 77 |
| 18 | 70 | 1 | 80 | 80 | 95.00% | 3 | − | 93713821 | 93713902 | 82 |
| 18 | 64 | 4 | 80 | 80 | 92.30% | 3 | − | 93710593 | 93712882 | 2290 |
| 18 | 64 | 4 | 80 | 80 | 92.30% | 3 | − | 93707708 | 93709992 | 2285 |
| 18 | 60 | 4 | 80 | 80 | 89.70% | 3 | − | 91540858 | 91541781 | 924 |
| 18 | 60 | 4 | 80 | 80 | 89.70% | 3 | − | 91546798 | 91546876 | 79 |
| 18 | 58 | 4 | 80 | 80 | 88.40% | 3 | − | 93713482 | 93713560 | 79 |
| 18 | 58 | 4 | 80 | 80 | 88.40% | 3 | − | 91550699 | 91550777 | 79 |
| 18 | 58 | 4 | 80 | 80 | 88.40% | 3 | − | 91544583 | 91544661 | 79 |
| 18 | 55 | 14 | 80 | 80 | 92.60% | 5 | − | 49624825 | 49632618 | 7794 |
| 18 | 55 | 1 | 74 | 80 | 87.90% | 12 | − | 34832649 | 34833232 | 584 |
| 18 | 53 | 7 | 80 | 80 | 86.50% | 16 | − | 38267091 | 38267166 | 76 |
| 18 | 53 | 13 | 80 | 80 | 89.80% | 12 | − | 37258671 | 37267612 | 8942 |
| 18 | 52 | 13 | 80 | 80 | 88.30% | 3 | − | 91549683 | 91549750 | 68 |
| 18 | 50 | 4 | 53 | 80 | 100.00% | 3 | − | 93707060 | 93707109 | 50 |
| 18 | 46 | 4 | 80 | 80 | 80.60% | 3 | − | 90626989 | 90643226 | 16238 |
| 18 | 46 | 15 | 80 | 80 | 84.90% | 12 | − | 37264491 | 37264556 | 66 |
| 18 | 43 | 4 | 53 | 80 | 94.00% | 12 | − | 34717885 | 34718104 | 220 |
| 18 | 41 | 7 | 80 | 80 | 78.40% | 3 | − | 91286126 | 91286200 | 75 |
| 18 | 40 | 4 | 80 | 80 | 76.70% | Un_KI270512v1 | − | 17870 | 17948 | 79 |
| 18 | 40 | 4 | 80 | 80 | 76.70% | Un_KI270442v1 | − | 207790 | 207868 | 79 |
| 18 | 39 | 7 | 53 | 80 | 93.50% | 12 | − | 37257287 | 37257391 | 105 |
| 18 | 38 | 7 | 53 | 80 | 91.50% | Un_KI270317v1 | − | 37241 | 37289 | 49 |
| 18 | 38 | 7 | 53 | 80 | 91.50% | 5 | − | 49611225 | 49611273 | 49 |
| 18 | 38 | 13 | 80 | 80 | 86.60% | 3 | − | 90545653 | 90643215 | 97563 |
| 18 | 38 | 7 | 53 | 80 | 91.50% | 16 | − | 38280343 | 38280391 | 49 |
| 18 | 38 | 4 | 80 | 80 | 75.40% | 11 | − | 50779589 | 50779667 | 79 |
| 18 | 36 | 7 | 53 | 80 | 89.40% | Un_KI270317v1 | − | 1519 | 1567 | 49 |
| 18 | 33 | 4 | 80 | 80 | 97.30% | 7 | − | 62211514 | 62211593 | 80 |
| 18 | 33 | 13 | 53 | 80 | 90.30% | 3 | − | 93712494 | 93712534 | 41 |
| 18 | 33 | 13 | 53 | 80 | 97.20% | 16 | − | 38266438 | 38266818 | 381 |
| 18 | 33 | 13 | 53 | 80 | 90.30% | 16 | − | 38268819 | 38268859 | 41 |
| 18 | 33 | 13 | 53 | 80 | 90.30% | 12 | − | 34715523 | 34715563 | 41 |
| 18 | 31 | 13 | 51 | 80 | 89.80% | 4 | − | 67399485 | 67399523 | 39 |
| 18 | 31 | 15 | 53 | 80 | 89.80% | 12 | − | 34833010 | 34833048 | 39 |
| 18 | 29 | 13 | 51 | 80 | 87.20% | 16 | − | 38277291 | 38277329 | 39 |
| 18 | 25 | 2 | 27 | 80 | 100.00% | 17 | − | 22665014 | 22665041 | 28 |
| 18 | 23 | 4 | 27 | 80 | 100.00% | 3 | − | 93708616 | 93708641 | 26 |
| 18 | 23 | 4 | 27 | 80 | 100.00% | 3 | − | 93711501 | 93711526 | 26 |
| 18 | 23 | 7 | 30 | 80 | 100.00% | 10 | − | 41840863 | 41840888 | 26 |
| 18 | 20 | 59 | 80 | 80 | 95.50% | Un_KI270579v1 | − | 29179 | 29200 | 22 |
| 18 | 20 | 59 | 80 | 80 | 95.50% | 9 | − | 63079723 | 63079744 | 22 |
| 18 | 20 | 59 | 80 | 80 | 95.50% | 21 | − | 5286988 | 5287009 | 22 |
| 18 | 20 | 47 | 80 | 80 | 79.50% | 20 | − | 29733396 | 29733429 | 34 |
| 2 | 80 | 1 | 80 | 80 | 100.00% | 3 | + | 91813172 | 91813251 | 80 |
| 2 | 80 | 1 | 80 | 80 | 100.00% | 3 | + | 91807388 | 91807467 | 80 |
| 2 | 80 | 1 | 80 | 80 | 100.00% | 3 | + | 91775247 | 91775326 | 80 |
| 2 | 80 | 1 | 80 | 80 | 100.00% | 3 | + | 91755003 | 91755082 | 80 |
| 2 | 80 | 1 | 80 | 80 | 100.00% | 3 | + | 91743776 | 91743855 | 80 |
| 2 | 80 | 1 | 80 | 80 | 100.00% | 3 | + | 91720638 | 91720717 | 80 |
| 2 | 80 | 1 | 80 | 80 | 100.00% | 3 | + | 91698522 | 91698601 | 80 |
| 2 | 80 | 1 | 80 | 80 | 100.00% | 3 | + | 91688311 | 91688390 | 80 |
| 2 | 80 | 1 | 80 | 80 | 100.00% | 3 | + | 91668073 | 91668152 | 80 |
| 2 | 80 | 1 | 80 | 80 | 100.00% | 3 | + | 91665182 | 91665261 | 80 |
| 2 | 80 | 1 | 80 | 80 | 100.00% | 3 | + | 91651048 | 91651127 | 80 |
| 2 | 80 | 1 | 80 | 80 | 100.00% | 3 | + | 91645266 | 91645345 | 80 |
| 2 | 80 | 1 | 80 | 80 | 100.00% | 3 | + | 91642373 | 91642452 | 80 |
| 2 | 80 | 1 | 80 | 80 | 100.00% | 3 | + | 91626562 | 91626641 | 80 |
| 2 | 80 | 1 | 80 | 80 | 100.00% | 3 | + | 91594753 | 91594832 | 80 |
| 2 | 80 | 1 | 80 | 80 | 100.00% | 3 | + | 91591862 | 91591941 | 80 |
| 2 | 78 | 1 | 80 | 80 | 98.80% | 3 | − | 93706258 | 93706337 | 80 |
| 2 | 78 | 1 | 80 | 80 | 98.80% | 3 | − | 93712031 | 93712110 | 80 |
| 2 | 78 | 1 | 80 | 80 | 98.80% | 3 | − | 91543807 | 91543886 | 80 |
| 2 | 78 | 1 | 80 | 80 | 98.80% | 3 | − | 91549247 | 91549326 | 80 |
| 2 | 76 | 1 | 80 | 80 | 97.50% | 3 | − | 93709146 | 93709225 | 80 |
| 2 | 76 | 1 | 80 | 80 | 97.50% | 3 | − | 91548231 | 91548310 | 80 |
| 2 | 76 | 1 | 80 | 80 | 97.50% | 3 | − | 91552136 | 91552215 | 80 |
| 2 | 72 | 1 | 79 | 80 | 92.30% | 3 | − | 91546025 | 91546101 | 77 |
| 2 | 68 | 1 | 80 | 80 | 92.50% | 12 | − | 37263720 | 37263799 | 80 |
| 2 | 68 | 1 | 80 | 80 | 92.50% | 12 | − | 34718442 | 34718521 | 80 |
| 2 | 66 | 1 | 80 | 80 | 91.30% | 3 | − | 93708468 | 93708547 | 80 |
| 2 | 66 | 1 | 80 | 80 | 91.30% | 3 | − | 93711353 | 93711432 | 80 |
| 2 | 66 | 1 | 80 | 80 | 91.30% | 12 | − | 37261003 | 37261082 | 80 |
| 2 | 66 | 1 | 80 | 80 | 91.30% | 10 | − | 41839534 | 41839613 | 80 |
| 2 | 64 | 1 | 72 | 80 | 94.50% | 3 | − | 90600358 | 90600429 | 72 |
| 2 | 64 | 1 | 80 | 80 | 90.00% | 12 | − | 37238799 | 37238878 | 80 |
| 2 | 64 | 1 | 80 | 80 | 90.00% | 12 | − | 37251694 | 37251773 | 80 |
| 2 | 64 | 1 | 80 | 80 | 90.00% | 12 | − | 37259991 | 37260070 | 80 |
| 2 | 64 | 1 | 80 | 80 | 90.00% | 12 | − | 37260331 | 37260410 | 80 |
| 2 | 64 | 1 | 80 | 80 | 90.00% | 12 | − | 34834979 | 34835058 | 80 |
| 2 | 64 | 1 | 80 | 80 | 90.00% | 10 | − | 41840718 | 41840797 | 80 |
| 2 | 63 | 1 | 80 | 80 | 90.00% | 3 | − | 93706938 | 93707186 | 249 |
| 2 | 63 | 1 | 72 | 80 | 94.50% | 3 | − | 90551377 | 90552643 | 1267 |
| 2 | 62 | 1 | 79 | 80 | 89.90% | 3 | − | 90692725 | 90702557 | 9833 |
| 2 | 62 | 1 | 72 | 80 | 93.10% | 3 | − | 90719111 | 90719182 | 72 |
| 2 | 62 | 1 | 72 | 80 | 93.10% | 3 | − | 90520378 | 90520449 | 72 |
| 2 | 62 | 1 | 72 | 80 | 93.10% | 3 | − | 90500383 | 90500454 | 72 |
| 2 | 62 | 1 | 80 | 80 | 88.80% | 12 | − | 37239815 | 37239894 | 80 |
| 2 | 62 | 1 | 72 | 80 | 93.10% | 12 | − | 37253797 | 37253868 | 72 |
| 2 | 62 | 1 | 72 | 80 | 93.10% | 12 | − | 34833574 | 34833645 | 72 |
| 2 | 62 | 1 | 80 | 80 | 88.80% | 10 | − | 41833440 | 41833519 | 80 |
| 2 | 62 | 1 | 72 | 80 | 93.10% | 10 | − | 41830904 | 41830975 | 72 |
| 2 | 61 | 1 | 72 | 80 | 93.10% | 3 | − | 90408885 | 90686071 | 277187 |
| 2 | 60 | 1 | 72 | 80 | 91.70% | 3 | − | 90581736 | 90581807 | 72 |
| 2 | 60 | 1 | 72 | 80 | 91.70% | 12 | − | 34716082 | 34716153 | 72 |
| 2 | 60 | 2 | 69 | 80 | 94.20% | 12 | − | 34821492 | 34821559 | 68 |
| 2 | 60 | 1 | 72 | 80 | 91.70% | 12 | − | 34833234 | 34833305 | 72 |
| 2 | 59 | 1 | 72 | 80 | 91.60% | 1 | − | 124961063 | 124961305 | 243 |
| 2 | 59 | 1 | 72 | 80 | 91.70% | 1 | − | 124988057 | 124988299 | 243 |
| 2 | 58 | 1 | 72 | 80 | 90.30% | Un_KI270303v1 | − | 1085 | 1156 | 72 |
| 2 | 58 | 1 | 80 | 80 | 86.30% | 3 | − | 91553152 | 91553231 | 80 |
| 2 | 58 | 1 | 72 | 80 | 90.30% | 3 | − | 90548114 | 90548185 | 72 |
| 2 | 56 | 7 | 72 | 80 | 92.50% | Un_KI270366v1 | − | 2285 | 2350 | 66 |
| 2 | 56 | 1 | 72 | 80 | 88.90% | 5_GL000208v1_random | − | 43187 | 43258 | 72 |
| 2 | 56 | 1 | 72 | 80 | 88.90% | 3 | − | 90578167 | 90578238 | 72 |
| 2 | 56 | 1 | 66 | 80 | 92.50% | 3 | − | 90488191 | 90488256 | 66 |
| 2 | 56 | 1 | 70 | 80 | 93.80% | 12 | − | 34716424 | 34716494 | 71 |
| 2 | 56 | 1 | 66 | 80 | 92.50% | 12 | − | 34820477 | 34820542 | 66 |
| 2 | 56 | 1 | 66 | 80 | 92.50% | 12 | − | 34820816 | 34820881 | 66 |
| 2 | 55 | 1 | 65 | 80 | 92.40% | 3 | − | 90690836 | 90690900 | 65 |
| 2 | 54 | 1 | 72 | 80 | 87.50% | 5 | − | 49613885 | 49613956 | 72 |
| 2 | 54 | 1 | 72 | 80 | 87.50% | 3 | − | 90616783 | 90616854 | 72 |
| 2 | 54 | 1 | 72 | 80 | 87.50% | 10 | − | 41839202 | 41839273 | 72 |
| 2 | 53 | 1 | 63 | 80 | 92.10% | 12 | − | 37252107 | 37252169 | 63 |
| 2 | 53 | 1 | 65 | 80 | 90.80% | 12 | − | 34710310 | 34710374 | 65 |
| 2 | 52 | 7 | 68 | 80 | 92.00% | 5_GL000208v1_random | − | 5353 | 5414 | 62 |
| 2 | 52 | 1 | 66 | 80 | 89.40% | 3 | − | 91530844 | 91530909 | 66 |
| 2 | 52 | 1 | 66 | 80 | 89.40% | 3 | − | 90502459 | 90502524 | 66 |
| 2 | 52 | 7 | 66 | 80 | 93.40% | 20 | − | 30163565 | 30163624 | 60 |
| 2 | 52 | 1 | 72 | 80 | 86.20% | 1 | − | 124959871 | 124959942 | 72 |
| 2 | 50 | 1 | 72 | 80 | 84.80% | 3 | − | 90687654 | 90687725 | 72 |
| 2 | 50 | 1 | 66 | 80 | 87.90% | 3 | − | 90511948 | 90512013 | 66 |
| 2 | 50 | 1 | 66 | 80 | 87.90% | 10 | − | 41832601 | 41832666 | 66 |
| 2 | 50 | 1 | 72 | 80 | 84.80% | 1 | − | 121923711 | 121923782 | 72 |
| 2 | 49 | 8 | 66 | 80 | 91.60% | 12 | − | 34711333 | 34711391 | 59 |
| 2 | 48 | 7 | 64 | 80 | 91.40% | 5 | − | 46333342 | 46333399 | 58 |
| 2 | 48 | 17 | 72 | 80 | 92.90% | 12 | − | 37266439 | 37266494 | 56 |
| 2 | 46 | 17 | 69 | 80 | 94.40% | 10 | − | 39190659 | 39353539 | 162881 |
| 2 | 45 | 17 | 69 | 80 | 92.50% | 11 | − | 54932324 | 54932376 | 53 |
| 2 | 42 | 22 | 69 | 80 | 93.80% | 11 | − | 54877517 | 54877564 | 48 |
| 2 | 42 | 17 | 66 | 80 | 92.00% | 10 | − | 39289661 | 39289710 | 50 |
| 2 | 41 | 23 | 69 | 80 | 93.70% | 11 | − | 54881632 | 54881678 | 47 |
| 2 | 41 | 17 | 65 | 80 | 91.90% | 11 | − | 50546179 | 50546227 | 49 |
| 2 | 41 | 22 | 69 | 80 | 93.70% | 10 | − | 39353659 | 39363160 | 9502 |
| 2 | 40 | 21 | 68 | 80 | 91.70% | 16_KI270728v1_random | − | 612954 | 613001 | 48 |
| 2 | 38 | 30 | 72 | 80 | 95.40% | Un_KI270317v1 | − | 1065 | 1109 | 45 |
| 2 | 38 | 23 | 66 | 80 | 93.20% | 11 | − | 55230762 | 55230805 | 44 |
| 2 | 37 | 17 | 63 | 80 | 89.40% | 11 | − | 55066450 | 55066496 | 47 |
| 2 | 36 | 33 | 72 | 80 | 95.00% | 5 | − | 49612186 | 49612225 | 40 |
| 2 | 36 | 22 | 69 | 80 | 87.50% | 11 | − | 48706435 | 48706482 | 48 |
| 2 | 35 | 1 | 41 | 80 | 92.70% | 10 | − | 41828481 | 41828521 | 41 |
| 2 | 33 | 22 | 72 | 80 | 82.40% | 1 | − | 121975741 | 121975791 | 51 |
| 2 | 28 | 1 | 30 | 80 | 96.70% | 22 | − | 15996865 | 15996894 | 30 |
| 2 | 25 | 1 | 27 | 80 | 96.30% | X | − | 62524981 | 62525007 | 27 |
| 2 | 23 | 1 | 27 | 80 | 92.60% | Un_KI270411v1 | − | 1033 | 1059 | 27 |
| 2 | 22 | 47 | 72 | 80 | 92.40% | 22 | − | 15997164 | 15997189 | 26 |
| 2 | 20 | 32 | 51 | 80 | 100.00% | X | − | 62525290 | 62525309 | 20 |
| 2 | 20 | 22 | 41 | 80 | 100.00% | 11 | − | 50517626 | 50517645 | 20 |
| 3 | 80 | 1 | 80 | 80 | 100.00% | 3 | + | 92019076 | 92019155 | 80 |
| 3 | 80 | 1 | 80 | 80 | 100.00% | 3 | + | 92013291 | 92013370 | 80 |
| 3 | 80 | 1 | 80 | 80 | 100.00% | 3 | + | 91944231 | 91944310 | 80 |
| 3 | 80 | 1 | 80 | 80 | 100.00% | 3 | + | 91923991 | 91924070 | 80 |
| 3 | 80 | 1 | 80 | 80 | 100.00% | 3 | + | 91893016 | 91893095 | 80 |
| 3 | 80 | 1 | 80 | 80 | 100.00% | 3 | + | 91878476 | 91878555 | 80 |
| 3 | 80 | 1 | 80 | 80 | 100.00% | 3 | + | 91844466 | 91844545 | 80 |
| 3 | 80 | 1 | 80 | 80 | 100.00% | 3 | + | 91833236 | 91833315 | 80 |
| 3 | 80 | 1 | 80 | 80 | 100.00% | 3 | + | 91827791 | 91827870 | 80 |
| 3 | 80 | 1 | 80 | 80 | 100.00% | 3 | + | 91819116 | 91819195 | 80 |
| 3 | 80 | 1 | 80 | 80 | 100.00% | 3 | + | 91743936 | 91744015 | 80 |
| 3 | 80 | 1 | 80 | 80 | 100.00% | 3 | + | 91688471 | 91688550 | 80 |
| 3 | 80 | 1 | 80 | 80 | 100.00% | 3 | + | 91679801 | 91679880 | 80 |
| 3 | 80 | 1 | 80 | 80 | 100.00% | 3 | + | 91645426 | 91645505 | 80 |
| 3 | 80 | 1 | 80 | 80 | 100.00% | 3 | + | 91632501 | 91632580 | 80 |
| 3 | 80 | 1 | 80 | 80 | 100.00% | 3 | + | 91623831 | 91623910 | 80 |
| 3 | 78 | 1 | 80 | 80 | 98.80% | 3 | − | 91549087 | 91549166 | 80 |
| 3 | 78 | 1 | 80 | 80 | 98.80% | 3 | − | 91543647 | 91543726 | 80 |
| 3 | 76 | 1 | 80 | 80 | 97.50% | 3 | − | 93711871 | 93711950 | 80 |
| 3 | 76 | 1 | 80 | 80 | 97.50% | 3 | − | 93708986 | 93709065 | 80 |
| 3 | 72 | 1 | 80 | 80 | 95.00% | 3 | − | 93706098 | 93706177 | 80 |
| 3 | 70 | 1 | 80 | 80 | 93.80% | 3 | − | 91545864 | 91545943 | 80 |
| 3 | 68 | 1 | 80 | 80 | 92.50% | 3 | − | 91548072 | 91548151 | 80 |
| 3 | 66 | 1 | 80 | 80 | 93.10% | 3 | − | 91552656 | 91552734 | 79 |
| 3 | 66 | 1 | 80 | 80 | 91.30% | 3 | − | 91551977 | 91552056 | 80 |
| 3 | 65 | 1 | 80 | 80 | 93.00% | Un_KI270412v1 | − | 364 | 442 | 79 |
| 3 | 65 | 1 | 80 | 80 | 95.80% | 12 | − | 37259153 | 37267369 | 8217 |
| 3 | 65 | 1 | 80 | 80 | 93.00% | 12 | − | 37264917 | 37264995 | 79 |
| 3 | 65 | 1 | 80 | 80 | 93.00% | 12 | − | 34715915 | 34715993 | 79 |
| 3 | 64 | 1 | 80 | 80 | 91.70% | 3 | − | 93709663 | 93709741 | 79 |
| 3 | 64 | 1 | 80 | 80 | 91.70% | 3 | − | 93706780 | 93706858 | 79 |
| 3 | 63 | 1 | 80 | 80 | 94.40% | Un_KI270411v1 | − | 1161 | 1579 | 419 |
| 3 | 63 | 1 | 80 | 80 | 94.40% | 3 | − | 93708649 | 93710078 | 1430 |
| 3 | 63 | 1 | 80 | 80 | 94.40% | 3 | − | 91540944 | 91542200 | 1257 |
| 3 | 63 | 1 | 80 | 80 | 90.20% | 3 | − | 91540605 | 91540682 | 78 |
| 3 | 63 | 1 | 80 | 80 | 91.60% | 12 | − | 37263213 | 37263291 | 79 |
| 3 | 63 | 1 | 80 | 80 | 91.60% | 12 | − | 37261524 | 37261602 | 79 |
| 3 | 63 | 1 | 80 | 80 | 91.60% | 12 | − | 37260172 | 37260250 | 79 |
| 3 | 63 | 1 | 80 | 80 | 91.60% | 12 | − | 37252271 | 37252349 | 79 |
| 3 | 63 | 1 | 80 | 80 | 90.30% | 12 | − | 34719301 | 34719379 | 79 |
| 3 | 63 | 1 | 80 | 80 | 91.60% | 12 | − | 34717608 | 34717686 | 79 |
| 3 | 63 | 1 | 80 | 80 | 91.60% | 10 | − | 41841577 | 41841655 | 79 |
| 3 | 63 | 1 | 80 | 80 | 91.60% | 10 | − | 41840899 | 41840977 | 79 |
| 3 | 63 | 1 | 80 | 80 | 91.60% | 10 | − | 41839713 | 41839791 | 79 |
| 3 | 62 | 1 | 80 | 80 | 94.40% | 3 | − | 93711534 | 93715508 | 3975 |
| 3 | 62 | 1 | 79 | 80 | 94.30% | 3 | − | 93715432 | 93715839 | 408 |
| 3 | 62 | 1 | 80 | 80 | 90.30% | 3 | − | 93714245 | 93714323 | 79 |
| 3 | 62 | 5 | 80 | 80 | 92.20% | 3 | − | 90622971 | 90624509 | 1539 |
| 3 | 62 | 1 | 80 | 80 | 94.30% | 12 | − | 37248829 | 37262620 | 13792 |
| 3 | 62 | 1 | 80 | 80 | 91.50% | 12 | − | 37266951 | 37267029 | 79 |
| 3 | 62 | 1 | 80 | 80 | 94.40% | 10 | − | 41840053 | 41840297 | 245 |
| 3 | 61 | 1 | 78 | 80 | 94.30% | 4 | − | 67400224 | 67400640 | 417 |
| 3 | 61 | 1 | 80 | 80 | 91.40% | 3 | − | 93716104 | 93716182 | 79 |
| 3 | 61 | 1 | 80 | 80 | 90.20% | 12 | − | 37266611 | 37266689 | 79 |
| 3 | 61 | 1 | 80 | 80 | 90.20% | 10 | − | 41837849 | 41837927 | 79 |
| 3 | 60 | 1 | 80 | 80 | 93.00% | 12 | − | 37263798 | 37263978 | 181 |
| 3 | 60 | 1 | 80 | 80 | 90.00% | 12 | − | 37260844 | 37260922 | 79 |
| 3 | 60 | 1 | 80 | 80 | 87.50% | 12 | − | 37252949 | 37253028 | 80 |
| 3 | 60 | 1 | 80 | 80 | 90.00% | 12 | − | 34716596 | 34716674 | 79 |
| 3 | 59 | 1 | 76 | 80 | 91.10% | Un_KI270411v1 | − | 150 | 224 | 75 |
| 3 | 59 | 1 | 80 | 80 | 88.80% | 12 | − | 37263561 | 37263639 | 79 |
| 3 | 59 | 1 | 80 | 80 | 91.60% | 12 | − | 34716936 | 34719041 | 2106 |
| 3 | 58 | 1 | 80 | 80 | 87.50% | 3 | − | 91544329 | 91544407 | 79 |
| 3 | 57 | 1 | 78 | 80 | 88.50% | 12 | − | 37264240 | 37264316 | 77 |
| 3 | 56 | 8 | 80 | 80 | 90.70% | 12 | − | 37265593 | 37265664 | 72 |
| 3 | 55 | 8 | 80 | 80 | 87.70% | 3 | − | 91545525 | 91545597 | 73 |
| 3 | 55 | 1 | 80 | 80 | 88.10% | 16 | − | 38280068 | 38280146 | 79 |
| 3 | 54 | 8 | 80 | 80 | 87.50% | 3 | − | 93705761 | 93705831 | 71 |
| 3 | 54 | 1 | 80 | 80 | 87.90% | 12 | − | 37259832 | 37259910 | 79 |
| 3 | 52 | 1 | 76 | 80 | 84.90% | Un_KI270412v1 | − | 708 | 781 | 74 |
| 3 | 52 | 6 | 71 | 80 | 87.50% | 3 | − | 90691520 | 90691584 | 65 |
| 3 | 52 | 1 | 80 | 80 | 85.30% | 16 | − | 38268538 | 38268616 | 79 |
| 3 | 52 | 8 | 80 | 80 | 90.00% | 12 | − | 34831491 | 34831562 | 72 |
| 3 | 51 | 1 | 80 | 80 | 94.40% | 4 | − | 67399542 | 67399620 | 79 |
| 3 | 51 | 5 | 75 | 80 | 94.80% | 3 | − | 90534315 | 90581982 | 47668 |
| 3 | 50 | 1 | 80 | 80 | 81.30% | 10 | − | 41842256 | 41842335 | 80 |
| 3 | 49 | 1 | 80 | 80 | 94.70% | 5 | − | 46356187 | 46356709 | 523 |
| 3 | 49 | 2 | 80 | 80 | 89.50% | 16 | − | 38265816 | 38265893 | 78 |
| 3 | 48 | 5 | 75 | 80 | 92.40% | 3 | − | 90514274 | 90514343 | 70 |
| 3 | 48 | 2 | 80 | 80 | 89.30% | 16 | − | 38275995 | 38276072 | 78 |
| 3 | 46 | 5 | 80 | 80 | 94.40% | Un_KI270538v1 | − | 57928 | 58275 | 348 |
| 3 | 45 | 5 | 78 | 80 | 90.20% | 21 | − | 7246234 | 7246306 | 73 |
| 3 | 45 | 5 | 78 | 80 | 90.20% | 21 | − | 5316215 | 5316287 | 73 |
| 3 | 44 | 5 | 75 | 80 | 91.70% | 3 | − | 90634901 | 90634970 | 70 |
| 3 | 44 | 5 | 75 | 80 | 91.70% | 3 | − | 90510249 | 90510318 | 70 |
| 3 | 42 | 1 | 80 | 80 | 93.20% | Un_KI270412v1 | − | 1042 | 1120 | 79 |
| 3 | 42 | 1 | 76 | 80 | 91.40% | Un_KI270412v1 | − | 28 | 102 | 75 |
| 3 | 41 | 8 | 75 | 80 | 91.20% | 3 | − | 90609496 | 90609562 | 67 |
| 3 | 40 | 5 | 80 | 80 | 97.70% | 3 | − | 90581806 | 90623148 | 41343 |
| 3 | 36 | 5 | 75 | 80 | 92.20% | 3 | − | 90630314 | 90630383 | 70 |
| 3 | 36 | 5 | 75 | 80 | 92.20% | 3 | − | 90458369 | 90458438 | 70 |
| 3 | 36 | 5 | 75 | 80 | 92.20% | 3 | − | 90428176 | 90428245 | 70 |
| 3 | 33 | 44 | 80 | 80 | 94.60% | 3 | − | 91546541 | 91546577 | 37 |
| 3 | 32 | 1 | 34 | 80 | 97.10% | Un_KI270411v1 | − | 1884 | 1917 | 34 |
| 3 | 32 | 1 | 34 | 80 | 97.10% | 4 | − | 67400267 | 67400300 | 34 |
| 3 | 31 | 1 | 35 | 80 | 94.30% | 3 | − | 91546585 | 91546619 | 35 |
| 3 | 31 | 2 | 34 | 80 | 97.00% | 16 | − | 38267222 | 38267254 | 33 |
| 3 | 30 | 1 | 34 | 80 | 94.20% | Un_KI270411v1 | − | 1206 | 1239 | 34 |
| 3 | 29 | 1 | 33 | 80 | 94.00% | Un_KI270411v1 | − | 2563 | 2595 | 33 |
| 3 | 29 | 45 | 79 | 80 | 91.50% | 3 | − | 93710001 | 93710035 | 35 |
| 3 | 29 | 44 | 80 | 80 | 89.20% | 3 | − | 93715761 | 93715797 | 37 |
| 3 | 29 | 5 | 34 | 80 | 100.00% | 12 | − | 34716981 | 34717175 | 195 |
| 3 | 28 | 1 | 34 | 80 | 91.20% | 3 | − | 91540989 | 91541022 | 34 |
| 3 | 26 | 45 | 80 | 80 | 86.20% | Un_KI270411v1 | − | 1501 | 1536 | 36 |
| 3 | 25 | 1 | 27 | 80 | 96.30% | Un_KI270411v1 | − | 874 | 900 | 27 |
| 3 | 23 | 44 | 70 | 80 | 92.60% | Un_KI270411v1 | − | 1849 | 1875 | 27 |
| 3 | 23 | 58 | 80 | 80 | 100.00% | Un_KI270411v1 | − | 2518 | 2540 | 23 |
| 3 | 23 | 8 | 34 | 80 | 92.60% | 3 | − | 93708693 | 93708719 | 27 |
| 3 | 23 | 54 | 80 | 80 | 92.60% | 12 | − | 34718963 | 34718989 | 27 |
| 4 | 80 | 1 | 80 | 80 | 100.00% | 3 | + | 91606900 | 91606979 | 80 |
| 4 | 80 | 1 | 80 | 80 | 100.00% | 3 | + | 91604008 | 91604087 | 80 |
| 4 | 80 | 1 | 80 | 80 | 100.00% | 3 | + | 91601115 | 91601194 | 80 |
| 4 | 80 | 1 | 80 | 80 | 100.00% | 3 | + | 91598224 | 91598303 | 80 |
| 4 | 80 | 1 | 80 | 80 | 100.00% | 3 | + | 91594993 | 91595072 | 80 |
| 4 | 80 | 1 | 80 | 80 | 100.00% | 3 | + | 91592102 | 91592181 | 80 |
| 4 | 80 | 1 | 80 | 80 | 100.00% | 3 | + | 91590059 | 91590138 | 80 |
| 4 | 80 | 1 | 80 | 80 | 100.00% | 3 | + | 91584276 | 91584355 | 80 |
| 4 | 80 | 1 | 80 | 80 | 100.00% | 3 | + | 91581383 | 91581462 | 80 |
| 4 | 80 | 1 | 80 | 80 | 100.00% | 3 | + | 91575603 | 91575682 | 80 |
| 4 | 80 | 1 | 80 | 80 | 100.00% | 3 | + | 91572715 | 91572794 | 80 |
| 4 | 80 | 1 | 80 | 80 | 100.00% | 3 | + | 91567270 | 91567349 | 80 |
| 4 | 80 | 1 | 80 | 80 | 100.00% | 3 | + | 91564374 | 91564453 | 80 |
| 4 | 80 | 1 | 80 | 80 | 100.00% | 3 | + | 91561820 | 91561899 | 80 |
| 4 | 80 | 1 | 80 | 80 | 100.00% | 3 | + | 91558925 | 91559004 | 80 |
| 4 | 80 | 1 | 80 | 80 | 100.00% | 3 | + | 91556038 | 91556117 | 80 |
| 4 | 78 | 1 | 80 | 80 | 96.30% | 3 | + | 93062400 | 93062478 | 79 |
| 4 | 76 | 1 | 80 | 80 | 97.50% | 3 | − | 91551560 | 91551639 | 80 |
| 4 | 76 | 1 | 80 | 80 | 97.50% | 3 | − | 91548670 | 91548749 | 80 |
| 4 | 74 | 1 | 80 | 80 | 96.30% | 3 | − | 91552576 | 91552655 | 80 |
| 4 | 70 | 1 | 80 | 80 | 93.80% | 3 | − | 91545445 | 91545524 | 80 |
| 4 | 66 | 1 | 80 | 80 | 91.30% | 3 | − | 91543233 | 91543312 | 80 |
| 4 | 62 | 1 | 80 | 80 | 84.00% | 3 | − | 93711459 | 93711533 | 75 |
| 4 | 62 | 1 | 80 | 80 | 84.00% | 3 | − | 93708574 | 93708648 | 75 |
| 4 | 62 | 1 | 80 | 80 | 84.00% | 3 | − | 93705686 | 93705760 | 75 |
| 4 | 61 | 1 | 80 | 80 | 88.70% | 12 | − | 34832649 | 34832728 | 80 |
| 4 | 60 | 1 | 80 | 80 | 87.90% | 3 | − | 91547658 | 91547736 | 79 |
| 4 | 59 | 1 | 80 | 80 | 87.50% | 12 | − | 37258337 | 37258812 | 476 |
| 4 | 59 | 1 | 80 | 80 | 87.50% | 10 | − | 41839973 | 41841576 | 1604 |
| 4 | 58 | 1 | 80 | 80 | 86.30% | 3 | − | 93715351 | 93715430 | 80 |
| 4 | 58 | 1 | 80 | 80 | 86.30% | 16 | − | 38267097 | 38267176 | 80 |
| 4 | 57 | 1 | 80 | 80 | 86.30% | 5 | − | 49624151 | 49630941 | 6791 |
| 4 | 56 | 8 | 80 | 80 | 89.10% | 12 | − | 37263481 | 37263722 | 242 |
| 4 | 55 | 8 | 80 | 80 | 87.70% | 3 | − | 93715681 | 93715753 | 73 |
| 4 | 55 | 1 | 80 | 80 | 85.00% | 16 | − | 38278968 | 38280401 | 1434 |
| 4 | 51 | 1 | 80 | 80 | 82.50% | 5 | − | 49643806 | 49644221 | 416 |
| 4 | 51 | 1 | 77 | 80 | 83.20% | 3 | − | 93706021 | 93706097 | 77 |
| 4 | 51 | 8 | 80 | 80 | 85.00% | 3 | − | 90360501 | 90360573 | 73 |
| 4 | 50 | 1 | 80 | 80 | 81.30% | 5 | − | 49631882 | 49631961 | 80 |
| 4 | 50 | 11 | 80 | 80 | 91.10% | 3 | − | 91550366 | 91550434 | 69 |
| 4 | 50 | 1 | 80 | 80 | 81.30% | 16 | − | 38279988 | 38280067 | 80 |
| 4 | 49 | 8 | 80 | 80 | 83.60% | 9 | − | 63075806 | 63075878 | 73 |
| 4 | 49 | 8 | 80 | 80 | 83.60% | 7 | − | 57913272 | 57913344 | 73 |
| 4 | 49 | 8 | 80 | 80 | 83.60% | 21 | − | 12983436 | 12983508 | 73 |
| 4 | 49 | 14 | 80 | 80 | 86.60% | 12 | − | 37259752 | 37259818 | 67 |
| 4 | 47 | 8 | 80 | 80 | 82.20% | 7 | − | 57967645 | 57967717 | 73 |
| 4 | 46 | 8 | 80 | 80 | 91.10% | 3 | − | 93779766 | 93780178 | 413 |
| 4 | 46 | 17 | 80 | 80 | 92.00% | 3 | − | 91553253 | 91553315 | 63 |
| 4 | 44 | 11 | 80 | 80 | 81.50% | 3 | − | 91525826 | 91525895 | 70 |
| 4 | 44 | 8 | 80 | 80 | 80.60% | 15 | − | 17076410 | 17076482 | 73 |
| 4 | 44 | 12 | 77 | 80 | 83.40% | 12 | − | 37254629 | 37254694 | 66 |
| 4 | 42 | 11 | 80 | 80 | 80.00% | 3 | − | 91539161 | 91539230 | 70 |
| 4 | 39 | 1 | 42 | 80 | 97.70% | 22 | − | 15156952 | 15157116 | 165 |
| 4 | 38 | 1 | 42 | 80 | 95.30% | 5 | − | 49615035 | 49615076 | 42 |
| 4 | 38 | 1 | 42 | 80 | 95.30% | 5 | − | 49617075 | 49617116 | 42 |
| 4 | 38 | 1 | 42 | 80 | 95.30% | 2 | − | 94513488 | 94513529 | 42 |
| 4 | 38 | 1 | 42 | 80 | 95.30% | 12 | − | 34834101 | 34834142 | 42 |
| 4 | 38 | 1 | 42 | 80 | 95.30% | 10 | − | 41841196 | 41841237 | 42 |
| 4 | 37 | 1 | 42 | 80 | 95.20% | 22 | − | 15155755 | 15155967 | 213 |
| 4 | 36 | 1 | 42 | 80 | 92.90% | 5 | − | 49612996 | 49613037 | 42 |
| 4 | 36 | 1 | 42 | 80 | 92.90% | 16 | − | 38278326 | 38278367 | 42 |
| 4 | 35 | 6 | 42 | 80 | 97.30% | 2 | − | 94521706 | 94521742 | 37 |
| 4 | 34 | 11 | 80 | 80 | 87.50% | 16 | − | 34612243 | 34612311 | 69 |
| 4 | 34 | 8 | 42 | 80 | 100.00% | 10 | − | 41839673 | 41839874 | 202 |
| 4 | 33 | 8 | 40 | 80 | 100.00% | Un_KI270329v1 | − | 476 | 508 | 33 |
| 4 | 33 | 8 | 44 | 80 | 94.60% | 7 | − | 57981340 | 57981376 | 37 |
| 4 | 33 | 8 | 40 | 80 | 100.00% | 3 | − | 90643194 | 90643226 | 33 |
| 4 | 33 | 8 | 42 | 80 | 97.20% | 3 | − | 90485770 | 90485804 | 35 |
| 4 | 33 | 6 | 42 | 80 | 94.60% | 22 | − | 15163435 | 15163471 | 37 |
| 4 | 33 | 8 | 42 | 80 | 97.20% | 20 | − | 28888897 | 28888931 | 35 |
| 4 | 33 | 8 | 69 | 80 | 89.20% | 16 | − | 35936044 | 35936104 | 61 |
| 4 | 33 | 8 | 69 | 80 | 94.60% | 16 | − | 35940461 | 35940523 | 63 |
| 4 | 33 | 8 | 42 | 80 | 97.20% | 15 | − | 19782376 | 19782410 | 35 |
| 4 | 33 | 6 | 42 | 80 | 94.60% | 14 | − | 18233662 | 18233698 | 37 |
| 4 | 32 | 11 | 42 | 80 | 100.00% | Un_KI270411v1 | − | 780 | 811 | 32 |
| 4 | 32 | 11 | 42 | 80 | 100.00% | Un_KI270304v1 | − | 785 | 816 | 32 |
| 4 | 32 | 11 | 42 | 80 | 100.00% | 5 | − | 49645870 | 49645901 | 32 |
| 4 | 32 | 11 | 42 | 80 | 100.00% | 5 | − | 49633616 | 49633647 | 32 |
| 4 | 32 | 8 | 42 | 80 | 97.20% | 16 | − | 38268155 | 38268358 | 204 |
| 4 | 32 | 11 | 42 | 80 | 100.00% | 16 | − | 38278666 | 38278697 | 32 |
| 4 | 32 | 11 | 42 | 80 | 100.00% | 15 | − | 19786460 | 19786491 | 32 |
| 4 | 31 | 8 | 42 | 80 | 94.30% | Un_KI270591v1 | − | 4770 | 4804 | 35 |
| 4 | 31 | 11 | 41 | 80 | 100.00% | Un_KI270310v1 | − | 1066 | 1096 | 31 |
| 4 | 31 | 8 | 75 | 80 | 68.20% | 16_KI270728v1_random | − | 611681 | 611746 | 66 |
| 4 | 30 | 8 | 69 | 80 | 96.90% | 7 | − | 61845779 | 61845841 | 63 |
| 4 | 30 | 11 | 42 | 80 | 96.90% | 5 | − | 50198435 | 50198466 | 32 |
| 4 | 30 | 11 | 42 | 80 | 96.90% | 3 | − | 90487115 | 90487146 | 32 |
| 4 | 30 | 11 | 42 | 80 | 96.90% | 3 | − | 90489170 | 90489201 | 32 |
| 4 | 30 | 11 | 42 | 80 | 96.90% | 2 | − | 94538605 | 94538636 | 32 |
| 4 | 30 | 11 | 42 | 80 | 96.90% | 15 | − | 19784590 | 19784621 | 32 |
| 4 | 29 | 8 | 38 | 80 | 96.80% | 22 | − | 16077061 | 16077091 | 31 |
| 4 | 28 | 8 | 68 | 80 | 96.70% | Y | − | 17673610 | 17673671 | 62 |
| 4 | 28 | 9 | 68 | 80 | 96.70% | 9 | − | 64213671 | 64213731 | 61 |
| 4 | 28 | 6 | 33 | 80 | 100.00% | 3 | − | 93713535 | 93713562 | 28 |
| 4 | 28 | 11 | 42 | 80 | 93.80% | 3 | − | 90489510 | 90489541 | 32 |
| 4 | 28 | 15 | 42 | 80 | 100.00% | 11 | − | 48936956 | 48936983 | 28 |
| 4 | 26 | 11 | 40 | 80 | 93.40% | X | − | 62525572 | 62525601 | 30 |
| 4 | 26 | 11 | 42 | 80 | 90.70% | Un_KI270366v1 | − | 4799 | 4830 | 32 |
| 4 | 26 | 13 | 42 | 80 | 93.40% | 5_GL000208v1_random | − | 73822 | 73851 | 30 |
| 4 | 26 | 11 | 42 | 80 | 90.70% | 2 | − | 94514039 | 94514070 | 32 |
| 4 | 26 | 11 | 42 | 80 | 90.70% | 11 | − | 55259545 | 55259576 | 32 |
| 4 | 20 | 57 | 80 | 80 | 91.70% | 4 | − | 67398783 | 67398806 | 24 |
| 5 | 80 | 1 | 80 | 80 | 100.00% | 3 | + | 91850412 | 91850491 | 80 |
| 5 | 80 | 1 | 80 | 80 | 100.00% | 3 | + | 91838842 | 91838921 | 80 |
| 5 | 80 | 1 | 80 | 80 | 100.00% | 3 | + | 91822167 | 91822246 | 80 |
| 5 | 80 | 1 | 80 | 80 | 100.00% | 3 | + | 91813492 | 91813571 | 80 |
| 5 | 80 | 1 | 80 | 80 | 100.00% | 3 | + | 91781352 | 91781431 | 80 |
| 5 | 80 | 1 | 80 | 80 | 100.00% | 3 | + | 91775567 | 91775646 | 80 |
| 5 | 80 | 1 | 80 | 80 | 100.00% | 3 | + | 91752432 | 91752511 | 80 |
| 5 | 80 | 1 | 80 | 80 | 100.00% | 3 | + | 91709392 | 91709471 | 80 |
| 5 | 80 | 1 | 80 | 80 | 100.00% | 3 | + | 91698842 | 91698921 | 80 |
| 5 | 80 | 1 | 80 | 80 | 100.00% | 3 | + | 91626882 | 91626961 | 80 |
| 5 | 80 | 1 | 80 | 80 | 100.00% | 3 | + | 91618207 | 91618286 | 80 |
| 5 | 80 | 1 | 80 | 80 | 100.00% | 3 | + | 91595412 | 91595491 | 80 |
| 5 | 80 | 1 | 80 | 80 | 100.00% | 3 | + | 91595073 | 91595152 | 80 |
| 5 | 80 | 1 | 80 | 80 | 100.00% | 3 | + | 91592182 | 91592261 | 80 |
| 5 | 80 | 1 | 80 | 80 | 100.00% | 3 | + | 91581463 | 91581542 | 80 |
| 5 | 80 | 1 | 80 | 80 | 100.00% | 3 | + | 91556118 | 91556197 | 80 |
| 5 | 76 | 1 | 80 | 80 | 97.50% | 3 | − | 91548929 | 91549008 | 80 |
| 5 | 76 | 1 | 80 | 80 | 97.50% | 3 | − | 91551819 | 91551898 | 80 |
| 5 | 76 | 1 | 80 | 80 | 97.50% | 3 | − | 91543489 | 91543568 | 80 |
| 5 | 75 | 1 | 80 | 80 | 97.50% | 3 | − | 93711713 | 93712131 | 419 |
| 5 | 74 | 1 | 80 | 80 | 96.30% | 3 | − | 91547914 | 91547993 | 80 |
| 5 | 72 | 1 | 80 | 80 | 95.00% | 3 | − | 93705940 | 93706019 | 80 |
| 5 | 72 | 1 | 80 | 80 | 95.00% | 3 | − | 93708828 | 93708907 | 80 |
| 5 | 71 | 1 | 80 | 80 | 95.00% | 5 | − | 49646260 | 49646508 | 249 |
| 5 | 71 | 1 | 80 | 80 | 95.00% | 10 | − | 41839724 | 41839972 | 249 |
| 5 | 70 | 1 | 80 | 80 | 93.80% | 3 | − | 91545706 | 91545785 | 80 |
| 5 | 70 | 1 | 80 | 80 | 93.80% | 3 | − | 90507030 | 90507109 | 80 |
| 5 | 70 | 1 | 80 | 80 | 93.80% | 10 | − | 41841418 | 41841497 | 80 |
| 5 | 67 | 1 | 80 | 80 | 94.70% | 3 | − | 93708317 | 93708568 | 252 |
| 5 | 67 | 1 | 80 | 80 | 94.70% | 3 | − | 93711202 | 93711453 | 252 |
| 5 | 67 | 1 | 80 | 80 | 92.50% | 3 | − | 91547408 | 91547657 | 250 |
| 5 | 67 | 1 | 74 | 80 | 91.70% | 3 | − | 91543161 | 91543232 | 72 |
| 5 | 66 | 1 | 78 | 80 | 92.40% | X | − | 62516732 | 62516809 | 78 |
| 5 | 66 | 1 | 80 | 80 | 91.30% | 22 | − | 15190445 | 15190524 | 80 |
| 5 | 66 | 1 | 80 | 80 | 93.50% | 2 | − | 94517164 | 94518262 | 1099 |
| 5 | 66 | 1 | 80 | 80 | 91.30% | 2 | − | 94519378 | 94519457 | 80 |
| 5 | 66 | 1 | 80 | 80 | 91.30% | 2 | − | 94514949 | 94515028 | 80 |
| 5 | 66 | 1 | 74 | 80 | 96.00% | 16 | − | 38276012 | 38276254 | 243 |
| 5 | 66 | 1 | 80 | 80 | 91.30% | 14 | − | 18259650 | 18259729 | 80 |
| 5 | 66 | 1 | 74 | 80 | 94.60% | 12 | − | 37265439 | 37265512 | 74 |
| 5 | 65 | 1 | 80 | 80 | 93.40% | 5 | − | 49610955 | 49611203 | 249 |
| 5 | 65 | 1 | 80 | 80 | 93.40% | 16 | − | 38277699 | 38277948 | 250 |
| 5 | 65 | 1 | 79 | 80 | 91.20% | 1 | − | 124978521 | 124978599 | 79 |
| 5 | 64 | 1 | 80 | 80 | 90.00% | 3 | − | 90492064 | 90492143 | 80 |
| 5 | 64 | 1 | 80 | 80 | 87.40% | 22_KI270738v1_random | − | 88645 | 88723 | 79 |
| 5 | 64 | 1 | 80 | 80 | 90.00% | 20 | − | 29700375 | 29700454 | 80 |
| 5 | 64 | 1 | 77 | 80 | 92.30% | 12 | − | 37344561 | 37373656 | 29096 |
| 5 | 64 | 3 | 74 | 80 | 94.50% | 12 | − | 37255224 | 37255295 | 72 |
| 5 | 64 | 1 | 74 | 80 | 93.30% | 10 | − | 41832111 | 41832184 | 74 |
| 5 | 64 | 1 | 74 | 80 | 93.30% | 10 | − | 41839561 | 41839634 | 74 |
| 5 | 63 | 1 | 79 | 80 | 89.90% | 7 | − | 62557464 | 62557542 | 79 |
| 5 | 63 | 1 | 77 | 80 | 91.00% | 3 | − | 90714381 | 90714457 | 77 |
| 5 | 63 | 1 | 80 | 80 | 89.90% | 22 | − | 16030865 | 16031285 | 421 |
| 5 | 63 | 1 | 80 | 80 | 92.00% | 22 | − | 15158885 | 15172104 | 13220 |
| 5 | 63 | 1 | 80 | 80 | 92.20% | 2 | − | 94509787 | 94510033 | 247 |
| 5 | 63 | 1 | 73 | 80 | 93.20% | 12 | − | 37248335 | 37248407 | 73 |
| 5 | 62 | 1 | 80 | 80 | 88.80% | X | − | 62515203 | 62515282 | 80 |
| 5 | 62 | 1 | 80 | 80 | 88.80% | Un_KI270538v1 | − | 63013 | 63092 | 80 |
| 5 | 62 | 1 | 74 | 80 | 91.90% | 5 | − | 49626456 | 49626529 | 74 |
| 5 | 62 | 1 | 80 | 80 | 88.80% | 22 | − | 15195900 | 15195979 | 80 |
| 5 | 62 | 1 | 80 | 80 | 93.10% | 20 | − | 30166460 | 30166881 | 422 |
| 5 | 62 | 1 | 80 | 80 | 88.80% | 19 | − | 27403689 | 27403768 | 80 |
| 5 | 62 | 1 | 80 | 80 | 88.80% | 16_KI270728v1_random | − | 1758141 | 1758220 | 80 |
| 5 | 62 | 1 | 74 | 80 | 91.90% | 16 | − | 38279574 | 38279647 | 74 |
| 5 | 62 | 1 | 74 | 80 | 91.90% | 12 | − | 37261030 | 37261103 | 74 |
| 5 | 62 | 1 | 80 | 80 | 88.80% | 12 | − | 37257918 | 37257997 | 80 |
| 5 | 62 | 1 | 74 | 80 | 91.90% | 12 | − | 34715763 | 34715836 | 74 |
| 5 | 62 | 1 | 80 | 80 | 88.80% | 11 | − | 50722395 | 50722474 | 80 |
| 5 | 62 | 1 | 80 | 80 | 88.80% | 11 | − | 48915459 | 48915538 | 80 |
| 5 | 61 | 1 | 80 | 80 | 89.70% | 2 | − | 94515802 | 94516052 | 251 |
| 5 | 60 | 11 | 80 | 80 | 92.90% | 5_GL000208v1_random | − | 78985 | 79054 | 70 |
| 5 | 60 | 11 | 80 | 80 | 92.90% | 5_GL000208v1_random | − | 81199 | 81268 | 70 |
| 5 | 60 | 1 | 74 | 80 | 90.60% | 3 | − | 91549954 | 91550027 | 74 |
| 5 | 60 | 1 | 80 | 80 | 87.50% | 22 | − | 15190790 | 15190869 | 80 |
| 5 | 60 | 1 | 80 | 80 | 87.50% | 20 | − | 30160704 | 30160783 | 80 |
| 5 | 60 | 1 | 74 | 80 | 90.60% | 16 | − | 38279914 | 38279987 | 74 |
| 5 | 60 | 1 | 80 | 80 | 87.50% | 14 | − | 18259995 | 18260074 | 80 |
| 5 | 59 | 1 | 75 | 80 | 89.40% | 20 | − | 30994129 | 30994203 | 75 |
| 5 | 59 | 9 | 80 | 80 | 94.10% | 16 | − | 38279059 | 38279299 | 241 |
| 5 | 59 | 1 | 73 | 80 | 90.50% | 12 | − | 37263060 | 37263132 | 73 |
| 5 | 59 | 10 | 76 | 80 | 94.10% | 12 | − | 37363722 | 37363788 | 67 |
| 5 | 59 | 10 | 74 | 80 | 97.00% | 1 | − | 124985180 | 124985415 | 236 |
| 5 | 58 | 13 | 80 | 80 | 92.70% | Un_KI270538v1 | − | 57360 | 57427 | 68 |
| 5 | 58 | 1 | 80 | 80 | 90.30% | 5 | − | 50137417 | 50137667 | 251 |
| 5 | 58 | 1 | 80 | 80 | 90.30% | 5 | − | 50139972 | 50140222 | 251 |
| 5 | 58 | 1 | 80 | 80 | 86.30% | 3 | − | 90695300 | 90695379 | 80 |
| 5 | 58 | 1 | 80 | 80 | 86.30% | 22 | − | 15177819 | 15177898 | 80 |
| 5 | 58 | 1 | 80 | 80 | 86.30% | 20 | − | 30970113 | 30970192 | 80 |
| 5 | 58 | 1 | 74 | 80 | 89.20% | 12 | − | 34717454 | 34717527 | 74 |
| 5 | 57 | 1 | 80 | 80 | 86.30% | 14 | − | 18235244 | 18243179 | 7936 |
| 5 | 57 | 13 | 77 | 80 | 93.90% | 12 | − | 37359727 | 37359791 | 65 |
| 5 | 56 | 1 | 80 | 80 | 87.90% | 9 | − | 60554373 | 60554623 | 251 |
| 5 | 56 | 1 | 80 | 80 | 85.00% | 21 | − | 12978419 | 12978498 | 80 |
| 5 | 56 | 1 | 77 | 80 | 87.10% | 14 | − | 18227405 | 18233963 | 6559 |
| 5 | 55 | 14 | 80 | 80 | 91.10% | 5_GL000208v1_random | − | 86650 | 86716 | 67 |
| 5 | 55 | 10 | 80 | 80 | 95.10% | 12 | − | 37340653 | 37340894 | 242 |
| 5 | 53 | 10 | 80 | 80 | 87.40% | 14 | − | 18262720 | 18262790 | 71 |
| 5 | 53 | 1 | 71 | 80 | 89.60% | 11 | − | 55255346 | 55255572 | 227 |
| 5 | 50 | 1 | 80 | 80 | 90.40% | 2 | − | 94534395 | 94534474 | 80 |
| 5 | 47 | 9 | 80 | 80 | 84.10% | 22 | − | 15176456 | 15176696 | 241 |
| 5 | 47 | 28 | 80 | 80 | 94.40% | 12 | − | 37373414 | 37373466 | 53 |
| 5 | 45 | 28 | 80 | 80 | 92.50% | Un_KI270522v1 | − | 3242 | 3294 | 53 |
| 5 | 43 | 10 | 56 | 80 | 95.80% | 1 | − | 124994759 | 124994805 | 47 |
| 5 | 42 | 1 | 52 | 80 | 90.40% | 22 | − | 15159083 | 15159134 | 52 |
| 5 | 38 | 13 | 56 | 80 | 93.20% | 15 | − | 19794883 | 19794926 | 44 |
| 5 | 36 | 1 | 48 | 80 | 87.50% | 2 | − | 94525362 | 94525409 | 48 |
| 5 | 35 | 2 | 40 | 80 | 94.90% | 14 | − | 18227613 | 18227651 | 39 |
| 5 | 28 | 10 | 41 | 80 | 93.80% | 2 | − | 94517199 | 94517230 | 32 |
| 5 | 27 | 48 | 80 | 80 | 91.00% | 14 | − | 18243101 | 18243133 | 33 |
| 6 | 80 | 1 | 80 | 80 | 100.00% | 3 | + | 91856276 | 91856355 | 80 |
| 6 | 80 | 1 | 80 | 80 | 100.00% | 3 | + | 91830585 | 91830664 | 80 |
| 6 | 80 | 1 | 80 | 80 | 100.00% | 3 | + | 91787215 | 91787294 | 80 |
| 6 | 80 | 1 | 80 | 80 | 100.00% | 3 | + | 91749620 | 91749699 | 80 |
| 6 | 80 | 1 | 80 | 80 | 100.00% | 3 | + | 91738396 | 91738475 | 80 |
| 6 | 80 | 1 | 80 | 80 | 100.00% | 3 | + | 91729715 | 91729794 | 80 |
| 6 | 80 | 1 | 80 | 80 | 100.00% | 3 | + | 91721041 | 91721120 | 80 |
| 6 | 80 | 1 | 80 | 80 | 100.00% | 3 | + | 91706580 | 91706659 | 80 |
| 6 | 80 | 1 | 80 | 80 | 100.00% | 3 | + | 91688711 | 91688790 | 80 |
| 6 | 80 | 1 | 80 | 80 | 100.00% | 3 | + | 91685820 | 91685899 | 80 |
| 6 | 80 | 1 | 80 | 80 | 100.00% | 3 | + | 91671366 | 91671445 | 80 |
| 6 | 80 | 1 | 80 | 80 | 100.00% | 3 | + | 91662690 | 91662769 | 80 |
| 6 | 80 | 1 | 80 | 80 | 100.00% | 3 | + | 91651450 | 91651529 | 80 |
| 6 | 80 | 1 | 80 | 80 | 100.00% | 3 | + | 91624071 | 91624150 | 80 |
| 6 | 80 | 1 | 80 | 80 | 100.00% | 3 | + | 91601275 | 91601354 | 80 |
| 6 | 80 | 1 | 80 | 80 | 100.00% | 3 | + | 91572875 | 91572954 | 80 |
| 6 | 78 | 1 | 80 | 80 | 98.80% | 3 | − | 93705860 | 93705939 | 80 |
| 6 | 78 | 1 | 80 | 80 | 98.80% | 3 | − | 93708748 | 93708827 | 80 |
| 6 | 78 | 1 | 80 | 80 | 98.80% | 3 | − | 93711633 | 93711712 | 80 |
| 6 | 73 | 1 | 80 | 80 | 96.30% | 3 | − | 91547833 | 91547913 | 81 |
| 6 | 72 | 1 | 80 | 80 | 95.00% | 3 | − | 91548849 | 91548928 | 80 |
| 6 | 70 | 1 | 80 | 80 | 93.80% | 3 | − | 91545626 | 91545705 | 80 |
| 6 | 68 | 1 | 80 | 80 | 92.50% | 3 | − | 91551739 | 91551818 | 80 |
| 6 | 63 | 1 | 80 | 80 | 90.00% | 12 | − | 37265353 | 37265643 | 291 |
| 6 | 63 | 1 | 80 | 80 | 90.00% | 10 | − | 41839475 | 41839763 | 289 |
| 6 | 61 | 1 | 80 | 80 | 88.80% | 3 | − | 93708409 | 93708698 | 290 |
| 6 | 61 | 1 | 80 | 80 | 88.80% | 3 | − | 93711294 | 93711583 | 290 |
| 6 | 61 | 1 | 80 | 80 | 88.80% | 3 | − | 91545285 | 91545576 | 292 |
| 6 | 61 | 1 | 80 | 80 | 88.80% | 3 | − | 91547500 | 91547786 | 287 |
| 6 | 61 | 1 | 80 | 80 | 88.80% | 12 | − | 34716696 | 34716986 | 291 |
| 6 | 60 | 1 | 80 | 80 | 87.50% | 12 | − | 37251635 | 37251714 | 80 |
| 6 | 60 | 1 | 80 | 80 | 87.50% | 12 | − | 34834920 | 34834999 | 80 |
| 6 | 59 | 1 | 80 | 80 | 87.50% | 12 | − | 34718383 | 34718674 | 292 |
| 6 | 59 | 1 | 80 | 80 | 87.50% | 10 | − | 41839813 | 41840103 | 291 |
| 6 | 59 | 8 | 80 | 80 | 90.50% | 10 | − | 41841338 | 41841410 | 73 |
| 6 | 58 | 1 | 80 | 80 | 86.30% | Un_KI270411v1 | − | 1939 | 2018 | 80 |
| 6 | 58 | 1 | 80 | 80 | 86.30% | 3 | − | 91550206 | 91550285 | 80 |
| 6 | 58 | 1 | 80 | 80 | 86.30% | 12 | − | 37253050 | 37253129 | 80 |
| 6 | 57 | 1 | 80 | 80 | 86.30% | 3 | − | 91543075 | 91543362 | 288 |
| 6 | 57 | 1 | 80 | 80 | 86.30% | 12 | − | 37254466 | 37254756 | 291 |
| 6 | 53 | 8 | 80 | 80 | 86.40% | 12 | − | 37262303 | 37262375 | 73 |
| 6 | 53 | 12 | 80 | 80 | 88.50% | 12 | − | 37249945 | 37250013 | 69 |
| 6 | 53 | 12 | 80 | 80 | 88.50% | 12 | − | 37247568 | 37247636 | 69 |
| 6 | 52 | 13 | 80 | 80 | 88.30% | 16 | − | 38277114 | 38277181 | 68 |
| 6 | 51 | 12 | 80 | 80 | 87.00% | 12 | − | 37247908 | 37247976 | 69 |
| 6 | 51 | 12 | 80 | 80 | 87.00% | 12 | − | 37254126 | 37254194 | 69 |
| 6 | 49 | 12 | 80 | 80 | 85.60% | 12 | − | 34830234 | 34830302 | 69 |
| 6 | 48 | 9 | 80 | 80 | 83.40% | 3 | − | 91518385 | 91518456 | 72 |
| 6 | 47 | 1 | 80 | 80 | 80.00% | 2 | − | 94532265 | 94532384 | 120 |
| 6 | 46 | 9 | 80 | 80 | 82.00% | 3 | − | 91519895 | 91519966 | 72 |
| 6 | 45 | 4 | 80 | 80 | 76.40% | 12 | − | 37639835 | 37639910 | 76 |
| 6 | 44 | 12 | 75 | 80 | 84.40% | Y | − | 10231696 | 10231759 | 64 |
| 6 | 44 | 12 | 75 | 80 | 84.40% | 5 | − | 50224906 | 50224969 | 64 |
| 6 | 44 | 11 | 80 | 80 | 81.50% | 11 | − | 55259007 | 55259076 | 70 |
| 6 | 43 | 12 | 80 | 80 | 92.20% | 12 | − | 37240096 | 37240504 | 409 |
| 6 | 42 | 12 | 75 | 80 | 82.90% | 11 | − | 50711701 | 50711764 | 64 |
| 6 | 42 | 9 | 80 | 80 | 87.50% | 11 | − | 48938814 | 48939056 | 243 |
| 6 | 41 | 12 | 75 | 80 | 91.90% | 11 | − | 48795804 | 48796209 | 406 |
| 6 | 39 | 13 | 75 | 80 | 81.00% | 16 | − | 34201296 | 34201358 | 63 |
| 6 | 36 | 14 | 75 | 80 | 86.40% | 3 | − | 90381466 | 90381526 | 61 |
| 6 | 35 | 44 | 80 | 80 | 97.30% | 3 | − | 93754052 | 93754088 | 37 |
| 6 | 35 | 44 | 80 | 80 | 97.30% | 3 | − | 90486406 | 90486442 | 37 |
| 6 | 35 | 44 | 80 | 80 | 97.30% | 2 | − | 94554961 | 94554997 | 37 |
| 6 | 35 | 12 | 72 | 80 | 90.70% | 19 | − | 27342003 | 27342234 | 232 |
| 6 | 35 | 44 | 80 | 80 | 100.00% | 16_KI270728v1_random | − | 1758745 | 1758952 | 208 |
| 6 | 35 | 44 | 80 | 80 | 97.30% | 15 | − | 19798346 | 19798382 | 37 |
| 6 | 35 | 44 | 80 | 80 | 97.30% | 12 | − | 37264677 | 37264713 | 37 |
| 6 | 33 | 44 | 80 | 80 | 94.60% | 5_GL000208v1_random | − | 41930 | 41966 | 37 |
| 6 | 33 | 44 | 80 | 80 | 94.60% | 3 | − | 91530771 | 91530807 | 37 |
| 6 | 33 | 44 | 80 | 80 | 94.60% | 3 | − | 90474151 | 90474187 | 37 |
| 6 | 33 | 44 | 80 | 80 | 94.60% | 3 | − | 90506100 | 90506136 | 37 |
| 6 | 33 | 44 | 80 | 80 | 94.60% | 22 | − | 15172797 | 15172833 | 37 |
| 6 | 33 | 44 | 80 | 80 | 94.60% | 20 | − | 30165870 | 30165906 | 37 |
| 6 | 33 | 44 | 80 | 80 | 94.60% | 2 | − | 94553091 | 94553127 | 37 |
| 6 | 33 | 44 | 80 | 80 | 94.60% | 10 | − | 41830500 | 41830536 | 37 |
| 6 | 33 | 44 | 80 | 80 | 94.60% | 10 | − | 41835581 | 41835617 | 37 |
| 6 | 32 | 44 | 80 | 80 | 97.10% | 11 | − | 48920295 | 48920502 | 208 |
| 6 | 32 | 44 | 77 | 80 | 97.10% | 10 | − | 41833723 | 41833756 | 34 |
| 6 | 31 | 44 | 80 | 80 | 91.90% | X | − | 62527776 | 62527812 | 37 |
| 6 | 31 | 44 | 80 | 80 | 91.90% | 5 | − | 49627390 | 49627426 | 37 |
| 6 | 31 | 44 | 80 | 80 | 91.90% | 5 | − | 49627730 | 49627766 | 37 |
| 6 | 31 | 44 | 80 | 80 | 91.90% | 5 | − | 49632739 | 49632775 | 37 |
| 6 | 31 | 44 | 80 | 80 | 91.90% | 5 | − | 49633079 | 49633115 | 37 |
| 6 | 31 | 44 | 80 | 80 | 91.90% | 3 | − | 90440780 | 90440816 | 37 |
| 6 | 31 | 44 | 80 | 80 | 91.90% | 3 | − | 90478075 | 90478111 | 37 |
| 6 | 31 | 44 | 80 | 80 | 91.90% | 20 | − | 29721565 | 29721601 | 37 |
| 6 | 31 | 44 | 80 | 80 | 91.90% | 20 | − | 29721905 | 29721941 | 37 |
| 6 | 31 | 44 | 80 | 80 | 91.90% | 15 | − | 19794950 | 19794986 | 37 |
| 6 | 31 | 44 | 80 | 80 | 91.90% | 14 | − | 18240976 | 18241012 | 37 |
| 6 | 31 | 44 | 80 | 80 | 91.90% | 11 | − | 48941375 | 48941411 | 37 |
| 6 | 31 | 44 | 80 | 80 | 91.90% | 10 | − | 41835241 | 41835277 | 37 |
| 6 | 29 | 44 | 80 | 80 | 89.20% | 5_GL000208v1_random | − | 54691 | 54727 | 37 |
| 6 | 29 | 44 | 80 | 80 | 89.20% | 20 | − | 29710536 | 29710572 | 37 |
| 6 | 29 | 44 | 80 | 80 | 89.20% | 20 | − | 30157815 | 30157851 | 37 |
| 6 | 29 | 46 | 80 | 80 | 91.50% | 14 | − | 18244726 | 18244760 | 35 |
| 6 | 29 | 44 | 80 | 80 | 89.20% | 14 | − | 18261786 | 18261822 | 37 |
| 6 | 28 | 44 | 75 | 80 | 93.80% | 3 | − | 93717401 | 93717432 | 32 |
| 6 | 28 | 45 | 80 | 80 | 88.90% | 3 | − | 90406941 | 90406976 | 36 |
| 6 | 28 | 45 | 80 | 80 | 88.90% | 22 | − | 15178081 | 15178116 | 36 |
| 6 | 28 | 47 | 80 | 80 | 91.20% | 2 | − | 94555812 | 94555845 | 34 |
| 6 | 28 | 44 | 75 | 80 | 93.80% | 15 | − | 19799886 | 19799917 | 32 |
| 6 | 26 | 44 | 75 | 80 | 90.70% | 3 | − | 90398541 | 90398572 | 32 |
| 6 | 26 | 44 | 75 | 80 | 90.70% | 20 | − | 29705071 | 29705102 | 32 |
| 6 | 26 | 44 | 75 | 80 | 90.70% | 20 | − | 28806396 | 28806427 | 32 |
| 6 | 26 | 44 | 75 | 80 | 90.70% | 11 | − | 48941721 | 48941752 | 32 |
| 6 | 25 | 44 | 72 | 80 | 93.20% | 5 | − | 46344317 | 46344345 | 29 |
| 6 | 23 | 44 | 72 | 80 | 89.70% | 12 | − | 37644105 | 37644133 | 29 |
| 7 | 76 | 1 | 80 | 80 | 97.50% | 3 | − | 93708268 | 93708347 | 80 |
| 7 | 76 | 1 | 80 | 80 | 97.50% | 3 | − | 93711153 | 93711232 | 80 |
| 7 | 76 | 1 | 80 | 80 | 97.50% | 3 | − | 91545144 | 91545223 | 80 |
| 7 | 76 | 1 | 80 | 80 | 97.50% | 3 | + | 91663169 | 91663248 | 80 |
| 7 | 76 | 1 | 80 | 80 | 97.50% | 3 | + | 91657719 | 91657798 | 80 |
| 7 | 76 | 1 | 80 | 80 | 97.50% | 3 | + | 91651933 | 91652012 | 80 |
| 7 | 76 | 1 | 80 | 80 | 97.50% | 3 | + | 91643254 | 91643333 | 80 |
| 7 | 76 | 1 | 80 | 80 | 97.50% | 3 | + | 91636112 | 91636191 | 80 |
| 7 | 76 | 1 | 80 | 80 | 97.50% | 3 | + | 91627442 | 91627521 | 80 |
| 7 | 76 | 1 | 80 | 80 | 97.50% | 3 | + | 91621657 | 91621736 | 80 |
| 7 | 76 | 1 | 80 | 80 | 97.50% | 3 | + | 91615874 | 91615953 | 80 |
| 7 | 76 | 1 | 80 | 80 | 97.50% | 3 | + | 91613319 | 91613398 | 80 |
| 7 | 76 | 1 | 80 | 80 | 97.50% | 3 | + | 91607539 | 91607618 | 80 |
| 7 | 76 | 1 | 80 | 80 | 97.50% | 3 | + | 91601754 | 91601833 | 80 |
| 7 | 76 | 1 | 80 | 80 | 97.50% | 3 | + | 91598863 | 91598942 | 80 |
| 7 | 76 | 1 | 80 | 80 | 97.50% | 3 | + | 91595972 | 91596051 | 80 |
| 7 | 76 | 1 | 80 | 80 | 97.50% | 3 | + | 91592742 | 91592821 | 80 |
| 7 | 76 | 1 | 80 | 80 | 97.50% | 3 | + | 91587808 | 91587887 | 80 |
| 7 | 76 | 1 | 80 | 80 | 97.50% | 3 | + | 91582023 | 91582102 | 80 |
| 7 | 74 | 1 | 80 | 80 | 96.30% | 3 | − | 91542934 | 91543013 | 80 |
| 7 | 74 | 1 | 80 | 80 | 96.30% | 3 | − | 91547359 | 91547438 | 80 |
| 7 | 64 | 1 | 80 | 80 | 90.00% | 10 | − | 41838322 | 41838401 | 80 |
| 7 | 60 | 15 | 80 | 80 | 92.40% | 3 | − | 91551259 | 91551323 | 65 |
| 7 | 60 | 1 | 80 | 80 | 87.50% | 3 | − | 90493548 | 90493627 | 80 |
| 7 | 57 | 1 | 69 | 80 | 91.40% | 5_GL000208v1_random | − | 15344 | 15412 | 69 |
| 7 | 57 | 1 | 69 | 80 | 91.40% | 11 | − | 55254272 | 55254340 | 69 |
| 7 | 56 | 1 | 70 | 80 | 91.20% | 7 | − | 60887032 | 60888467 | 1436 |
| 7 | 56 | 1 | 72 | 80 | 87.20% | 3 | − | 93733396 | 93733466 | 71 |
| 7 | 56 | 1 | 72 | 80 | 88.90% | 19 | − | 27410471 | 27410542 | 72 |
| 7 | 55 | 1 | 69 | 80 | 89.90% | Un_KI270366v1 | − | 6689 | 6757 | 69 |
| 7 | 55 | 1 | 69 | 80 | 89.90% | 5_GL000208v1_random | − | 51498 | 51566 | 69 |
| 7 | 55 | 1 | 69 | 80 | 91.20% | 3 | − | 93752224 | 93756891 | 4668 |
| 7 | 55 | 1 | 69 | 80 | 89.90% | 3 | − | 90428144 | 90428212 | 69 |
| 7 | 55 | 1 | 69 | 80 | 89.90% | 15 | − | 19791369 | 19791437 | 69 |
| 7 | 54 | 1 | 68 | 80 | 89.80% | 3 | − | 93756309 | 93756376 | 68 |
| 7 | 54 | 1 | 72 | 80 | 87.50% | 2 | − | 94539814 | 94539885 | 72 |
| 7 | 53 | 1 | 69 | 80 | 88.50% | 9 | − | 63096124 | 63096192 | 69 |
| 7 | 53 | 1 | 69 | 80 | 88.50% | 5_GL000208v1_random | − | 21197 | 21265 | 69 |
| 7 | 53 | 1 | 69 | 80 | 88.50% | 5_GL000208v1_random | − | 49619 | 49687 | 69 |
| 7 | 53 | 1 | 69 | 80 | 88.50% | 5 | − | 46329048 | 46329116 | 69 |
| 7 | 53 | 1 | 69 | 80 | 88.50% | 5 | − | 46343839 | 46343907 | 69 |
| 7 | 53 | 1 | 69 | 80 | 88.50% | 5 | − | 47097837 | 47097905 | 69 |
| 7 | 53 | 1 | 69 | 80 | 88.50% | 3 | − | 90513114 | 90513182 | 69 |
| 7 | 53 | 1 | 69 | 80 | 88.50% | 3 | − | 90441844 | 90441912 | 69 |
| 7 | 53 | 1 | 69 | 80 | 88.50% | 3 | − | 90418694 | 90418762 | 69 |
| 7 | 53 | 1 | 69 | 80 | 88.50% | 22 | − | 16007514 | 16007582 | 69 |
| 7 | 53 | 1 | 69 | 80 | 88.50% | 15 | − | 19795163 | 19795231 | 69 |
| 7 | 53 | 1 | 69 | 80 | 90.70% | 11 | − | 48924424 | 48936523 | 12100 |
| 7 | 53 | 1 | 69 | 80 | 88.50% | 1 | − | 124991106 | 124991174 | 69 |
| 7 | 52 | 2 | 69 | 80 | 87.50% | Un_KI270442v1 | − | 137105 | 137171 | 67 |
| 7 | 51 | 1 | 69 | 80 | 89.30% | 5_GL000208v1_random | − | 13332 | 13727 | 396 |
| 7 | 51 | 1 | 69 | 80 | 87.00% | 5 | − | 46332969 | 46333037 | 69 |
| 7 | 51 | 1 | 69 | 80 | 87.00% | 5 | − | 47091644 | 47091712 | 69 |
| 7 | 51 | 1 | 69 | 80 | 87.00% | 3 | − | 90530039 | 90530107 | 69 |
| 7 | 51 | 1 | 69 | 80 | 87.00% | 3 | − | 90407154 | 90407222 | 69 |
| 7 | 51 | 1 | 69 | 80 | 87.00% | 3 | − | 90290939 | 90291007 | 69 |
| 7 | 51 | 1 | 69 | 80 | 88.10% | 21 | − | 8048651 | 8048887 | 237 |
| 7 | 51 | 1 | 69 | 80 | 87.00% | 20 | − | 29717514 | 29717582 | 69 |
| 7 | 51 | 1 | 67 | 80 | 88.10% | 2 | − | 94530091 | 94530157 | 67 |
| 7 | 51 | 1 | 69 | 80 | 87.00% | 11 | − | 50771954 | 50772022 | 69 |
| 7 | 51 | 1 | 69 | 80 | 87.00% | 11 | − | 50753059 | 50753127 | 69 |
| 7 | 51 | 1 | 70 | 80 | 87.20% | 11 | − | 48922728 | 48924492 | 1765 |
| 7 | 51 | 1 | 69 | 80 | 87.00% | 11 | − | 48915933 | 48916001 | 69 |
| 7 | 51 | 1 | 69 | 80 | 87.00% | 10 | − | 39433256 | 39433324 | 69 |
| 7 | 50 | 1 | 72 | 80 | 84.80% | 10 | − | 39454861 | 39454932 | 72 |
| 7 | 49 | 1 | 69 | 80 | 85.60% | Un_KI270442v1 | − | 369389 | 369457 | 69 |
| 7 | 49 | 7 | 69 | 80 | 85.50% | 5_GL000208v1_random | − | 20518 | 20579 | 62 |
| 7 | 49 | 7 | 69 | 80 | 85.50% | 5 | − | 47097158 | 47097219 | 62 |
| 7 | 49 | 1 | 69 | 80 | 85.60% | 22 | − | 16083094 | 16083162 | 69 |
| 7 | 49 | 1 | 69 | 80 | 85.60% | 22 | − | 15199454 | 15199522 | 69 |
| 7 | 49 | 1 | 69 | 80 | 86.60% | 20 | − | 28814933 | 28815171 | 239 |
| 7 | 49 | 1 | 69 | 80 | 85.60% | 15 | − | 19805889 | 19805957 | 69 |
| 7 | 49 | 1 | 69 | 80 | 85.60% | 12 | − | 37702094 | 37702162 | 69 |
| 7 | 49 | 1 | 69 | 80 | 87.50% | 11 | − | 48913344 | 48913412 | 69 |
| 7 | 49 | 1 | 69 | 80 | 85.60% | 10 | − | 39425609 | 39425677 | 69 |
| 7 | 48 | 1 | 66 | 80 | 86.40% | 5 | − | 47088102 | 47088167 | 66 |
| 7 | 48 | 1 | 70 | 80 | 88.80% | 21 | − | 7206506 | 7206917 | 412 |
| 7 | 48 | 1 | 69 | 80 | 88.60% | 20 | − | 29721094 | 29721333 | 240 |
| 7 | 48 | 1 | 69 | 80 | 82.90% | 12 | − | 37693536 | 37693602 | 67 |
| 7 | 47 | 1 | 70 | 80 | 94.40% | 3 | − | 90437932 | 90445312 | 7381 |
| 7 | 47 | 1 | 69 | 80 | 84.10% | 22 | − | 16082239 | 16082307 | 69 |
| 7 | 47 | 1 | 69 | 80 | 84.10% | 22 | − | 12333401 | 12333469 | 69 |
| 7 | 47 | 1 | 69 | 80 | 84.10% | 19 | − | 27401084 | 27401152 | 69 |
| 7 | 47 | 1 | 69 | 80 | 84.10% | 11 | − | 55247620 | 55247688 | 69 |
| 7 | 47 | 1 | 69 | 80 | 84.10% | 11 | − | 50752549 | 50752617 | 69 |
| 7 | 47 | 1 | 69 | 80 | 84.10% | 11 | − | 50770589 | 50770657 | 69 |
| 7 | 47 | 1 | 69 | 80 | 84.10% | 10 | − | 39426799 | 39426867 | 69 |
| 7 | 46 | 15 | 70 | 80 | 91.10% | 3 | − | 91524518 | 91524573 | 56 |
| 7 | 45 | 1 | 69 | 80 | 89.50% | 3 | − | 90495431 | 90495667 | 237 |
| 7 | 45 | 1 | 69 | 80 | 82.70% | 3 | − | 90389724 | 90389792 | 69 |
| 7 | 45 | 18 | 72 | 80 | 91.00% | 16 | − | 34615026 | 34615080 | 55 |
| 7 | 45 | 1 | 69 | 80 | 85.80% | 12 | − | 37677473 | 37677712 | 240 |
| 7 | 45 | 1 | 69 | 80 | 82.70% | 11 | − | 50727095 | 50727163 | 69 |
| 7 | 45 | 7 | 69 | 80 | 85.80% | 1 | − | 124995209 | 124995271 | 63 |
| 7 | 44 | 1 | 70 | 80 | 91.00% | Un_KI270519v1 | − | 43678 | 43747 | 70 |
| 7 | 42 | 1 | 69 | 80 | 77.80% | 11 | − | 50719811 | 50719872 | 62 |
| 7 | 41 | 17 | 69 | 80 | 88.70% | 3 | − | 93735273 | 93735325 | 53 |
| 7 | 41 | 1 | 69 | 80 | 79.80% | 11 | − | 50774189 | 50774257 | 69 |
| 7 | 38 | 1 | 69 | 80 | 86.60% | 7 | − | 57908715 | 57908955 | 241 |
| 7 | 37 | 15 | 69 | 80 | 93.10% | 2 | − | 94531284 | 94531509 | 226 |
| 7 | 36 | 16 | 69 | 80 | 83.40% | 22 | − | 16037827 | 16037880 | 54 |
| 7 | 29 | 1 | 42 | 80 | 89.20% | 10 | − | 39347886 | 39347941 | 56 |
| 7 | 28 | 1 | 32 | 80 | 93.80% | 11 | − | 48934951 | 48934982 | 32 |
| 7 | 27 | 35 | 69 | 80 | 84.90% | 21 | − | 12979571 | 12979604 | 34 |
| 7 | 27 | 42 | 72 | 80 | 93.60% | 11 | − | 55246591 | 55246621 | 31 |
| 7 | 26 | 1 | 32 | 80 | 90.70% | 5_GL000208v1_random | − | 76600 | 76631 | 32 |
| 7 | 24 | 42 | 69 | 80 | 92.90% | 5_GL000208v1_random | − | 76564 | 76591 | 28 |
| 7 | 22 | 42 | 69 | 80 | 89.30% | 3 | − | 93756650 | 93756677 | 28 |
| 7 | 20 | 6 | 29 | 80 | 91.70% | 3 | − | 90577162 | 90577185 | 24 |
| 8 | 80 | 1 | 80 | 80 | 100.00% | 3 | + | 92383662 | 92383741 | 80 |
| 8 | 80 | 1 | 80 | 80 | 100.00% | 3 | + | 92321541 | 92321620 | 80 |
| 8 | 80 | 1 | 80 | 80 | 100.00% | 3 | + | 92297210 | 92297289 | 80 |
| 8 | 80 | 1 | 80 | 80 | 100.00% | 3 | + | 92195963 | 92196042 | 80 |
| 8 | 80 | 1 | 80 | 80 | 100.00% | 3 | + | 92141863 | 92141942 | 80 |
| 8 | 80 | 1 | 80 | 80 | 100.00% | 3 | + | 92127745 | 92127824 | 80 |
| 8 | 80 | 1 | 80 | 80 | 100.00% | 3 | + | 92124851 | 92124930 | 80 |
| 8 | 80 | 1 | 80 | 80 | 100.00% | 3 | + | 92121960 | 92122039 | 80 |
| 8 | 80 | 1 | 80 | 80 | 100.00% | 3 | + | 92086923 | 92087002 | 80 |
| 8 | 80 | 1 | 80 | 80 | 100.00% | 3 | + | 92034340 | 92034419 | 80 |
| 8 | 80 | 1 | 80 | 80 | 100.00% | 3 | + | 91976839 | 91976918 | 80 |
| 8 | 80 | 1 | 80 | 80 | 100.00% | 3 | + | 91879275 | 91879354 | 80 |
| 8 | 80 | 1 | 80 | 80 | 100.00% | 3 | + | 91831144 | 91831223 | 80 |
| 8 | 80 | 1 | 80 | 80 | 100.00% | 3 | + | 91808348 | 91808427 | 80 |
| 8 | 80 | 1 | 80 | 80 | 100.00% | 3 | + | 91702033 | 91702112 | 80 |
| 8 | 80 | 1 | 80 | 80 | 100.00% | 3 | + | 91677709 | 91677788 | 80 |
| 8 | 76 | 1 | 80 | 80 | 97.50% | 3 | − | 93708188 | 93708267 | 80 |
| 8 | 76 | 1 | 80 | 80 | 97.50% | 3 | − | 93711073 | 93711152 | 80 |
| 8 | 74 | 1 | 80 | 80 | 96.30% | 3 | − | 91545064 | 91545143 | 80 |
| 8 | 74 | 1 | 80 | 80 | 96.30% | 3 | − | 91551179 | 91551258 | 80 |
| 8 | 72 | 1 | 80 | 80 | 95.00% | 3 | − | 91547279 | 91547358 | 80 |
| 8 | 62 | 1 | 80 | 80 | 88.80% | 3 | − | 91541335 | 91541414 | 80 |
| 8 | 62 | 1 | 80 | 80 | 88.80% | 3 | − | 91542854 | 91542933 | 80 |
| 8 | 58 | 1 | 80 | 80 | 86.30% | 10 | − | 41838242 | 41838321 | 80 |
| 8 | 52 | 1 | 70 | 80 | 87.20% | 3 | − | 93714984 | 93715053 | 70 |
| 8 | 51 | 11 | 80 | 80 | 87.20% | 2 | − | 94533924 | 94553282 | 19359 |
| 8 | 49 | 1 | 61 | 80 | 90.20% | 10 | − | 41840461 | 41840521 | 61 |
| 8 | 48 | 11 | 80 | 80 | 84.30% | 12 | − | 37369039 | 37369108 | 70 |
| 8 | 46 | 11 | 70 | 80 | 88.40% | 12 | − | 34712577 | 34712636 | 60 |
| 8 | 41 | 8 | 63 | 80 | 87.50% | 3 | − | 90414354 | 90414410 | 57 |
| 8 | 41 | 8 | 63 | 80 | 87.50% | 12 | − | 37348170 | 37348226 | 57 |
| 8 | 39 | 11 | 69 | 80 | 91.70% | 5 | − | 50199739 | 50199971 | 233 |
| 8 | 39 | 11 | 61 | 80 | 88.30% | 5 | − | 50240472 | 50240522 | 51 |
| 8 | 38 | 8 | 61 | 80 | 85.20% | 7 | − | 57988212 | 57988265 | 54 |
| 8 | 37 | 11 | 61 | 80 | 86.30% | 7 | − | 61734343 | 61734393 | 51 |
| 8 | 37 | 1 | 49 | 80 | 87.80% | 3 | − | 93716528 | 93716576 | 49 |
| 8 | 37 | 11 | 61 | 80 | 86.30% | 3 | − | 91533117 | 91533167 | 51 |
| 8 | 37 | 18 | 68 | 80 | 86.30% | 11 | − | 55047999 | 55048049 | 51 |
| 8 | 35 | 11 | 61 | 80 | 84.40% | X | − | 62523852 | 62523902 | 51 |
| 8 | 34 | 18 | 69 | 80 | 82.70% | 19 | − | 24215431 | 24215482 | 52 |
| 8 | 32 | 39 | 80 | 80 | 88.10% | 18 | − | 20818346 | 20818387 | 42 |
| 8 | 32 | 15 | 60 | 80 | 84.80% | 12 | − | 37692273 | 37692318 | 46 |
| 8 | 32 | 8 | 49 | 80 | 88.10% | 11 | − | 48787030 | 48787071 | 42 |
| 8 | 32 | 11 | 61 | 80 | 90.00% | 10 | − | 41829961 | 41830351 | 391 |
| 8 | 31 | 11 | 63 | 80 | 79.30% | 5_GL000208v1_random | − | 8823 | 8875 | 53 |
| 8 | 31 | 15 | 59 | 80 | 84.50% | 5_GL000208v1_random | − | 3033 | 3077 | 45 |
| 8 | 31 | 36 | 74 | 80 | 89.80% | 20 | − | 28801250 | 28801288 | 39 |
| 8 | 31 | 11 | 49 | 80 | 89.80% | 11 | − | 55201566 | 55201604 | 39 |
| 8 | 30 | 39 | 74 | 80 | 91.70% | 10 | − | 39453925 | 39453960 | 36 |
| 8 | 29 | 15 | 49 | 80 | 91.50% | 4 | − | 51798948 | 51798982 | 35 |
| 8 | 29 | 15 | 49 | 80 | 91.50% | 4 | − | 51807788 | 51807822 | 35 |
| 8 | 29 | 15 | 49 | 80 | 91.50% | 4 | − | 51809998 | 51810032 | 35 |
| 8 | 29 | 11 | 49 | 80 | 87.20% | 4 | − | 51817125 | 51817163 | 39 |
| 8 | 29 | 11 | 49 | 80 | 94.00% | 22 | − | 11232464 | 11232502 | 39 |
| 8 | 29 | 36 | 69 | 80 | 94.20% | 20 | − | 28804132 | 28804168 | 37 |
| 8 | 27 | 16 | 53 | 80 | 70.00% | 4 | − | 158252184 | 158252213 | 30 |
| 8 | 25 | 36 | 69 | 80 | 88.30% | Un_KI270442v1 | − | 151517 | 151553 | 37 |
| 8 | 25 | 36 | 68 | 80 | 87.90% | 20 | − | 28798869 | 28798901 | 33 |
| 8 | 24 | 36 | 63 | 80 | 92.90% | 11 | − | 48798491 | 48798518 | 28 |
| 8 | 23 | 39 | 61 | 80 | 100.00% | 16 | − | 34614445 | 34614467 | 23 |
| 8 | 23 | 8 | 31 | 80 | 100.00% | 12 | − | 37352449 | 37352473 | 25 |
| 8 | 22 | 8 | 29 | 80 | 100.00% | 5_GL000208v1_random | − | 72600 | 72621 | 22 |
| 8 | 20 | 41 | 60 | 80 | 100.00% | 18 | − | 40667710 | 40667729 | 20 |
| 8 | 20 | 54 | 73 | 80 | 100.00% | 13 | − | 86921795 | 86921814 | 20 |
| 9 | 80 | 1 | 80 | 80 | 100.00% | 3 | + | 91968245 | 91968324 | 80 |
| 9 | 80 | 1 | 80 | 80 | 100.00% | 3 | + | 91936439 | 91936518 | 80 |
| 9 | 80 | 1 | 80 | 80 | 100.00% | 3 | + | 91920104 | 91920183 | 80 |
| 9 | 80 | 1 | 80 | 80 | 100.00% | 3 | + | 91914320 | 91914399 | 80 |
| 9 | 80 | 1 | 80 | 80 | 100.00% | 3 | + | 91907675 | 91907754 | 80 |
| 9 | 80 | 1 | 80 | 80 | 100.00% | 3 | + | 91890583 | 91890662 | 80 |
| 9 | 80 | 1 | 80 | 80 | 100.00% | 3 | + | 91879355 | 91879434 | 80 |
| 9 | 80 | 1 | 80 | 80 | 100.00% | 3 | + | 91865590 | 91865669 | 80 |
| 9 | 80 | 1 | 80 | 80 | 100.00% | 3 | + | 91817104 | 91817183 | 80 |
| 9 | 80 | 1 | 80 | 80 | 100.00% | 3 | + | 91802649 | 91802728 | 80 |
| 9 | 80 | 1 | 80 | 80 | 100.00% | 3 | + | 91787854 | 91787933 | 80 |
| 9 | 80 | 1 | 80 | 80 | 100.00% | 3 | + | 91770503 | 91770582 | 80 |
| 9 | 80 | 1 | 80 | 80 | 100.00% | 3 | + | 91767608 | 91767687 | 80 |
| 9 | 80 | 1 | 80 | 80 | 100.00% | 3 | + | 91750259 | 91750338 | 80 |
| 9 | 80 | 1 | 80 | 80 | 100.00% | 3 | + | 91624710 | 91624789 | 80 |
| 9 | 80 | 1 | 80 | 80 | 100.00% | 3 | + | 91585076 | 91585155 | 80 |
| 9 | 78 | 1 | 80 | 80 | 98.80% | 3 | − | 93708108 | 93708187 | 80 |
| 9 | 78 | 1 | 80 | 80 | 98.80% | 3 | − | 93710993 | 93711072 | 80 |
| 9 | 76 | 1 | 80 | 80 | 97.50% | 3 | − | 91544984 | 91545063 | 80 |
| 9 | 76 | 1 | 80 | 80 | 97.50% | 3 | − | 91551099 | 91551178 | 80 |
| 9 | 72 | 1 | 80 | 80 | 95.00% | 3 | − | 91542774 | 91542853 | 80 |
| 9 | 69 | 1 | 77 | 80 | 94.90% | 3 | − | 91547202 | 91547278 | 77 |
| 9 | 68 | 1 | 80 | 80 | 92.50% | 10 | − | 41838162 | 41838241 | 80 |
| 9 | 65 | 1 | 80 | 80 | 91.20% | 3 | − | 93716417 | 93716496 | 80 |
| 9 | 61 | 7 | 80 | 80 | 91.90% | 20 | − | 30996304 | 30997229 | 926 |
| 9 | 60 | 1 | 80 | 80 | 87.50% | 3 | − | 93714894 | 93714973 | 80 |
| 9 | 58 | 7 | 77 | 80 | 92.60% | 5 | − | 46336191 | 46336430 | 240 |
| 9 | 58 | 1 | 77 | 80 | 84.00% | 10 | − | 41833938 | 41834012 | 75 |
| 9 | 57 | 7 | 73 | 80 | 94.10% | 11 | − | 50798462 | 50798866 | 405 |
| 9 | 56 | 1 | 77 | 80 | 82.70% | 10 | − | 41835799 | 41835873 | 75 |
| 9 | 56 | 7 | 80 | 80 | 87.90% | 1 | − | 124979335 | 124979408 | 74 |
| 9 | 54 | 7 | 80 | 80 | 86.50% | Un_KI270538v1 | − | 77535 | 77608 | 74 |
| 9 | 54 | 7 | 80 | 80 | 86.50% | 14 | − | 18235717 | 18235790 | 74 |
| 9 | 53 | 7 | 77 | 80 | 89.40% | 20 | − | 30980980 | 30981219 | 240 |
| 9 | 53 | 7 | 80 | 80 | 86.50% | 11 | − | 55248815 | 55249571 | 757 |
| 9 | 52 | 17 | 80 | 80 | 90.70% | X | − | 62509372 | 62509435 | 64 |
| 9 | 52 | 7 | 69 | 80 | 92.10% | 5 | − | 46329059 | 46333382 | 4324 |
| 9 | 52 | 7 | 77 | 80 | 82.70% | 2 | − | 94532312 | 94532380 | 69 |
| 9 | 51 | 7 | 77 | 80 | 87.90% | 20 | − | 29712422 | 29712659 | 238 |
| 9 | 51 | 1 | 69 | 80 | 87.00% | 12 | − | 37268438 | 37268506 | 69 |
| 9 | 51 | 7 | 80 | 80 | 85.20% | 1 | − | 124958310 | 124985720 | 27411 |
| 9 | 51 | 8 | 80 | 80 | 85.00% | 1 | − | 124984453 | 124984525 | 73 |
| 9 | 50 | 7 | 77 | 80 | 81.20% | 2 | − | 94536067 | 94536135 | 69 |
| 9 | 50 | 7 | 77 | 80 | 81.20% | 12 | − | 34709777 | 34709845 | 69 |
| 9 | 50 | 7 | 77 | 80 | 90.40% | 11 | − | 48923746 | 48925359 | 1614 |
| 9 | 50 | 7 | 77 | 80 | 81.20% | 10 | − | 41839860 | 41839928 | 69 |
| 9 | 50 | 7 | 80 | 80 | 83.80% | 1 | − | 124953535 | 124953608 | 74 |
| 9 | 49 | 17 | 77 | 80 | 92.90% | 11 | − | 48942106 | 48942335 | 230 |
| 9 | 49 | 7 | 80 | 80 | 93.00% | 1 | − | 124980015 | 124988447 | 8433 |
| 9 | 48 | 7 | 77 | 80 | 79.80% | 2 | − | 94552109 | 94552177 | 69 |
| 9 | 48 | 7 | 68 | 80 | 88.80% | 16 | − | 34209544 | 34209605 | 62 |
| 9 | 48 | 7 | 66 | 80 | 90.00% | 12 | − | 37637165 | 37637224 | 60 |
| 9 | 48 | 17 | 77 | 80 | 84.80% | 12 | − | 34714537 | 34714595 | 59 |
| 9 | 48 | 17 | 80 | 80 | 87.50% | 1 | − | 124986840 | 124986903 | 64 |
| 9 | 47 | 7 | 76 | 80 | 79.50% | 20 | − | 29721271 | 29721338 | 68 |
| 9 | 47 | 7 | 69 | 80 | 87.40% | 12 | − | 37636478 | 37636540 | 63 |
| 9 | 46 | 17 | 77 | 80 | 83.10% | 22 | − | 15171308 | 15171366 | 59 |
| 9 | 46 | 17 | 77 | 80 | 92.50% | 20 | − | 30981322 | 30981550 | 229 |
| 9 | 46 | 7 | 77 | 80 | 91.00% | 14 | − | 18259788 | 18260030 | 243 |
| 9 | 46 | 7 | 68 | 80 | 87.10% | 12 | − | 37639889 | 37639950 | 62 |
| 9 | 46 | 17 | 77 | 80 | 83.10% | 11 | − | 48931341 | 48931399 | 59 |
| 9 | 46 | 17 | 77 | 80 | 83.10% | 10 | − | 39439540 | 39439598 | 59 |
| 9 | 43 | 7 | 69 | 80 | 84.20% | 20 | − | 29720934 | 29720996 | 63 |
| 9 | 43 | 7 | 71 | 80 | 83.10% | 2 | − | 94538971 | 94539035 | 65 |
| 9 | 42 | 24 | 80 | 80 | 93.90% | 1 | − | 124996404 | 124996801 | 398 |
| 9 | 41 | 7 | 69 | 80 | 82.60% | 11 | − | 48939038 | 48939100 | 63 |
| 9 | 40 | 17 | 66 | 80 | 90.00% | 16_KI270728v1_random | − | 1758459 | 1758508 | 50 |
| 9 | 40 | 7 | 61 | 80 | 91.70% | 12 | − | 37268617 | 37268840 | 224 |
| 9 | 40 | 17 | 68 | 80 | 88.50% | 10 | − | 39425279 | 39425330 | 52 |
| 9 | 39 | 17 | 59 | 80 | 95.40% | 22 | − | 16039594 | 16039636 | 43 |
| 9 | 39 | 17 | 73 | 80 | 84.30% | 21 | − | 7971575 | 7971631 | 57 |
| 9 | 39 | 17 | 73 | 80 | 84.30% | 21 | − | 7975490 | 7975546 | 57 |
| 9 | 39 | 17 | 73 | 80 | 84.30% | 21 | − | 7979400 | 7979456 | 57 |
| 9 | 39 | 17 | 73 | 80 | 84.30% | 21 | − | 7995565 | 7995621 | 57 |
| 9 | 39 | 17 | 73 | 80 | 84.30% | 21 | − | 8032155 | 8032211 | 57 |
| 9 | 39 | 7 | 69 | 80 | 89.80% | 2 | − | 94521902 | 94522135 | 234 |
| 9 | 39 | 7 | 61 | 80 | 85.50% | 2 | − | 94537276 | 94537330 | 55 |
| 9 | 39 | 7 | 61 | 80 | 85.50% | 12 | − | 37947066 | 37947120 | 55 |
| 9 | 39 | 17 | 67 | 80 | 88.30% | 11 | − | 48911480 | 48911530 | 51 |
| 9 | 39 | 19 | 69 | 80 | 88.30% | 1 | − | 124969980 | 124970030 | 51 |
| 9 | 38 | 7 | 48 | 80 | 95.30% | 5 | − | 46329421 | 46329462 | 42 |
| 9 | 38 | 6 | 69 | 80 | 91.20% | 12 | − | 34712328 | 34712556 | 229 |
| 9 | 38 | 8 | 69 | 80 | 89.60% | 1 | − | 124938226 | 124938459 | 234 |
| 9 | 38 | 8 | 69 | 80 | 89.60% | 1 | − | 124939756 | 124939989 | 234 |
| 9 | 37 | 17 | 69 | 80 | 85.00% | 20 | − | 29707997 | 29708049 | 53 |
| 9 | 37 | 21 | 69 | 80 | 87.80% | 12 | − | 34834973 | 34835021 | 49 |
| 9 | 36 | 22 | 61 | 80 | 95.00% | 4 | − | 51795801 | 51795840 | 40 |
| 9 | 36 | 22 | 61 | 80 | 95.00% | 4 | − | 51798011 | 51798050 | 40 |
| 9 | 36 | 8 | 61 | 80 | 83.40% | 1 | − | 124936876 | 124936929 | 54 |
| 9 | 34 | 22 | 61 | 80 | 92.50% | 4 | − | 51806851 | 51806890 | 40 |
| 9 | 34 | 22 | 61 | 80 | 92.50% | 4 | − | 51809061 | 51809100 | 40 |
| 9 | 34 | 21 | 77 | 80 | 74.60% | 14 | − | 18261832 | 18261886 | 55 |
| 9 | 33 | 17 | 80 | 80 | 88.60% | 1 | − | 124987694 | 124987755 | 62 |
| 9 | 26 | 7 | 36 | 80 | 93.40% | 20 | − | 29701231 | 29701260 | 30 |
| 9 | 26 | 7 | 36 | 80 | 93.40% | 2 | − | 94534230 | 94534259 | 30 |
| 9 | 26 | 7 | 36 | 80 | 93.40% | 17 | − | 26882834 | 26882863 | 30 |
| 9 | 26 | 7 | 36 | 80 | 93.40% | 15 | − | 19794865 | 19794894 | 30 |
| 9 | 26 | 7 | 36 | 80 | 93.40% | 14 | − | 18231331 | 18231360 | 30 |
| 9 | 26 | 7 | 36 | 80 | 93.40% | 14 | − | 18236275 | 18236304 | 30 |
| 9 | 26 | 7 | 36 | 80 | 93.40% | 1 | − | 124934857 | 124934886 | 30 |
| 9 | 25 | 7 | 35 | 80 | 93.20% | 3 | − | 90455999 | 90456027 | 29 |
| 9 | 25 | 8 | 36 | 80 | 93.20% | 12 | − | 37357852 | 37357880 | 29 |
| 9 | 24 | 7 | 36 | 80 | 90.00% | 2 | − | 94555388 | 94555417 | 30 |
| 9 | 21 | 23 | 43 | 80 | 100.00% | 16 | − | 38265826 | 38265846 | 21 |
| 9 | 21 | 23 | 43 | 80 | 100.00% | 16 | − | 38276005 | 38276025 | 21 |
| 9 | 20 | 17 | 36 | 80 | 100.00% | 20 | − | 30995835 | 30995854 | 20 |
| 9 | 20 | 17 | 36 | 80 | 100.00% | 2 | − | 94513376 | 94513395 | 20 |
| 9 | 20 | 17 | 36 | 80 | 100.00% | 11 | − | 48931210 | 48931229 | 20 |
| 9 | 20 | 17 | 36 | 80 | 100.00% | 1 | − | 124979888 | 124979907 | 20 |

[0051] Although a number of sequences of each oligo had 100% homology to chromosome 3, there are also many off-target hits. For example, as shown in Table 2, Oligo 1 had 16 on-target hits, but also 24 off-target hits; Oligo 3 had 16 on-target hits, but also 33 off-target hits, etc.

TABLE 2

| | # on-target hits (CHR3) | # off-target hits (on other |
|---|---|---|
| SEQ ID | 100% unless otherwise | chromosomes) |
| NO | specified | >85% identity (>70 nt) |
| 1 | 16 | 24 |
| 2 | 16 | 20 |
| 3 | 16 | 33 |
| 4 | 16 | 8 |
| 5 | 16 | 34 |
| 6 | 15 | 5 |
| 7 | 18 (no 100%, >97%) | 3 |
| 8 | 16 | 2 |
| 9 | 16 | 3 |
| 10 | 18 | 1 |
| 11 | 15 | 20 |
| 12 | 19 | 15 |
| 13 | 16 | 23 |
| 14 | 18 (no 100%, >95%) | 2 |
| 15 | 18 | 0 |
| 16 | 17 (no 100%, >98%) | 6 |
| 17 | 16 | 33 |
| 18 | 16 (no 100%, >98%) | 1 |

[0052] These results strongly suggest that the centromere region of chromosome 3 may not contain specific sequences because there are many off-target hits to other chromosomes. Notwithstanding this, the present inventors have surprisingly identified 18 oligonucleotide sequences that hybridize highly specifically to the centromere region of chromosome 3, such that blocking DNA can be eliminated in hybridization assays if so desired.

### I. DEFINITIONS

[0053] Unless otherwise explained, all technical and scientific terms used herein have the same meaning as commonly understood by one of ordinary skill in the art to which a disclosed invention belongs. The singular terms “a,” “an,” and “the” include plural referents unless context clearly indicates otherwise. Similarly, the word “or” is intended to include “and” unless the context clearly indicates otherwise. “Comprising” means “including.” Hence “comprising A or B” means “including A” or “including B” or “including A and B.”

[0054] Suitable methods and materials for the practice and/or testing of embodiments of the disclosure are described below. Such methods and materials are illustrative only and are not intended to be limiting. Other methods and materials similar or equivalent to those described herein can be used. For example, conventional methods well known in the art to which the disclosure pertains are described in various general and more specific references, including, for example, Sambrook et al., Molecular Cloning: A Laboratory Manual, 2d ed., Cold Spring Harbor Laboratory Press, 1989; Sambrook et al., Molecular Cloning: A Laboratory Manual, 3d ed., Cold Spring Harbor Press, 2001; Ausubel et al., Current Protocols in Molecular Biology, Greene Publishing Associates, 1992 (and Supplements to 2000); Ausubel et al., Short Protocols in Molecular Biology: A Compendium of Methods from Current Protocols in Molecular Biology, 4th ed., Wiley & Sons, 1999; Harlow and Lane, Antibodies: A Laboratory Manual, Cold Spring Harbor Laboratory Press, 1990; and Harlow and Lane, Using Antibodies: A Laboratory Manual, Cold Spring Harbor Laboratory Press, 1999.

[0055] In order to facilitate review of the various embodiments of the disclosure, the following explanations of specific terms are provided:

[0056] Conjugating, joining, bonding or linking: Covalently linking one molecule to another molecule to make a larger molecule. For example, making two polypeptides into one contiguous polypeptide molecule, or covalently attaching a mass tag, hapten, nucleic acid, or other molecule to a polypeptide, such as a scFv antibody.

[0057] Detectable label: A compound or composition that is conjugated directly or indirectly to another molecule (such as a nucleic acid probe) to facilitate detection of that molecule. Specific, non-limiting examples of labels include fluorescent and fluorogenic moieties, chromogenic moieties, haptens, affinity tags, and radioactive isotopes. The label can be directly detectable (e.g., optically detectable) or indirectly detectable (for example, via interaction with one or more additional molecules that are in turn detectable). Exemplary labels in the context of the probes disclosed herein are described below. Methods for labeling nucleic acids, and guidance in the choice of labels useful for various purposes, are discussed, e.g., in Sambrook and Russell, in Molecular Cloning: A Laboratory Manual, 3rd Ed., Cold Spring Harbor Laboratory Press (2001) and Ausubel et al., in Current Protocols in Molecular Biology, Greene Publishing Associates and Wiley-Intersciences (1987, and including updates).

[0058] Hapten: A molecule, typically a small molecule that can combine specifically with an antibody, but typically is substantially incapable of being immunogenic except in combination with a carrier molecule

[0059] Hybridization: To form base pairs between complementary regions of two strands of DNA, RNA, or between DNA and RNA, thereby forming a duplex molecule. Hybridization conditions resulting in particular degrees of stringency will vary depending upon the nature of the hybridization method and the composition and length of the hybridizing nucleic acid sequences. Generally, the temperature of hybridization and the ionic strength (such as the Na+ concentration) of the hybridization buffer will determine the stringency of hybridization. The presence of a chemical which decreases hybridization (such as formamide) in the hybridization buffer will also determine the stringency (Sadhu et al., J. Biosci. 6:817-821, 1984). Calculations regarding hybridization conditions for attaining particular degrees of stringency are discussed in Sambrook et al., (1989) Molecular Cloning, second edition, Cold Spring Harbor Laboratory, Plainview, N.Y. (chapters 9 and 11). Hybridization conditions for ISH are also discussed in Landegent et al., Hum. Genet. 77:366-370, 1987; Lichter et al., Hum. Genet. 80:224-234, 1988; and Pinkel et al., Proc. Natl. Acad. Sci. USA 85:9138-9142, 1988.

[0060] Isolated: An “isolated” biological component (such as a nucleic acid molecule, protein, or cell) has been substantially separated or purified away from other biological components in a preparation, a cell of an organism, or the organism itself, in which the component occurs, such as other chromosomal and extra-chromosomal DNA and RNA, proteins and cells. Nucleic acid molecules and proteins that have been “isolated” include nucleic acid molecules and proteins purified by standard purification methods. The term also embraces nucleic acid molecules and proteins prepared by recombinant expression in a host cell as well as chemically synthesized nucleic acid molecules and proteins. In some examples, the nucleic acid probes disclosed herein are isolated nucleic acid probes.

[0061] Linker: As used herein, a linker is a molecule or group of atoms positioned between two moieties. For example, a mass tag conjugate may include a linker between the mass tag and the specific binding moiety. Typically, linkers are bifunctional, i.e., the linker includes a functional group at each end, wherein the functional groups are used to couple the linker to the two moieties. The two functional groups may be the same, i.e., a homobifunctional linker, or different, i.e., a heterobifunctional linker.

[0062] Multiplex, -ed, -ing: Embodiments of the present invention allow multiple targets in a sample to be detected substantially simultaneously, or sequentially, as desired, using plural different conjugates. Multiplexing can include identifying and/or quantifying nucleic acids generally, DNA, RNA, peptides, proteins, both individually and in any and all combinations. Multiplexing also can include detecting two or more of a gene, a messenger and a protein in a cell in its anatomic context.

[0063] Phosphatidylinositol 3-kinase, p110 subunit (PIK3CA): Also known as phosphoinositide-3-kinase, catalytic, alpha polypeptide. Human phosphatidylinositol 3-kinase (EC 2.7.1.137) is composed of 85-kD and 110-kD subunits. The 85-kD subunit lacks phosphatidylinositol 3-kinase activity and acts as an adaptor, coupling the 110-kD subunit (p110) to activated protein tyrosine kinases. The human p110 subunit is referred to herein as PIK3CA. Hiles et al. (Cell 70:419-429, 1992) found that the human cDNA for p110 predicts a 1,068-amino acid protein related to a protein which in S. cerevisiae is involved in the sorting of proteins to the vacuole. In COS-1 cells, p110 was catalytically active only when complexed with p85-alpha. Volinia et al. (Genomics 24:472-477, 1994) contributed to the structural and functional understanding of phosphatidylinositol 3-kinase by purifying, cloning, and subsequently elucidating the expression of the bovine enzyme. cDNA for the human PIK3CA encodes a protein 99% identical to the bovine p110. The chromosomal localization of the gene for human PIK3CA is shown to be at 3q21-qter as determined using somatic cell hybrids. In situ hybridization performed using Alu-PCR from the YAC DNA located the human gene in 3q26.3 [Chromosome 3: 178,865,902-178,957,881]. The sequence for the human PIK3CA gene was disclosed as early as 1994 by Volinia et al.

[0064] Probe: A nucleic acid molecule that is capable of hybridizing with a target nucleic acid molecule (e.g., genomic target nucleic acid molecule) and, when hybridized to the target, is capable of being detected either directly or indirectly. Thus probes permit the detection, and in some examples quantification, of a target nucleic acid molecule. In particular examples, a probe includes at least two segments complementary to uniquely specific nucleic acid sequences of a target nucleic acid molecule and are thus capable of specifically hybridizing to at least a portion of the target nucleic acid molecule. Generally, once at least one segment or portion of a segment has (and remains) hybridized to the target nucleic acid molecule other portions of the probe may (but need not) be physically constrained from hybridizing to those other portions' cognate binding sites in the target (e.g., such other portions are too far distant from their cognate binding sites); however, other nucleic acid molecules present in the probe can bind to one another, thus amplifying signal from the probe. A probe can be referred to as a “labeled nucleic acid probe,” indicating that the probe is coupled directly or indirectly to a detectable moiety or “label,” which renders the probe detectable.

[0065] Sample: A specimen containing DNA (for example, genomic DNA), RNA (including mRNA), protein, or combinations thereof, obtained from a subject. Examples include, but are not limited to, chromosomal preparations, peripheral blood, urine, saliva, tissue biopsy, fine needle aspirate, surgical specimen, bone marrow, amniocentesis samples, and autopsy material. In one example, a sample includes genomic DNA. In some examples, the sample is a cytogenetic preparation, for example which can be placed on microscope slides. In particular examples, samples are used directly, or can be manipulated prior to use, for example, by fixing (e.g., using formalin).

[0066] Sequence identity: The identity (or similarity) between two or more nucleic acid sequences is expressed in terms of the identity or similarity between the sequences. Sequence identity can be measured in terms of percentage identity; the higher the percentage, the more identical the sequences are. Sequence similarity can be measured in terms of percentage similarity (which takes into account conservative amino acid substitutions); the higher the percentage, the more similar the sequences are.

[0067] Methods of alignment of sequences for comparison are well known in the art. Various programs and alignment algorithms are described in: Smith & Waterman, Adv. Appl. Math. 2:482, 1981; Needleman & Wunsch, J. Mol. Biol. 48:443, 1970; Pearson & Lipman, Proc. Natl. Acad. Sci. USA 85:2444, 1988; Higgins & Sharp, Gene, 73:237-44, 1988; Higgins & Sharp, CABIOS 5:151-3, 1989; Corpet et al., Nuc. Acids Res. 16:10881-90, 1988; Huang et al. Computer Appls. in the Biosciences 8:155-65, 1992; and Pearson et al., Meth. Mol. Bio. 24:307-31, 1994. Altschul et al., J. Mol. Biol. 215:403-10, 1990, presents a detailed consideration of sequence alignment methods and homology calculations.

[0068] The NCBI Basic Local Alignment Search Tool (BLAST) (Altschul et al., J. Mol. Biol. 215:403-10, 1990) is available from several sources, including the National Center for Biotechnology and on the Internet, for use in connection with the sequence analysis programs blastp, blastn, blastx, tblastn and tblastx. Additional information can be found at the NCBI web site. BLASTN may be used to compare nucleic acid sequences, while BLASTP may be used to compare amino acid sequences. If the two compared sequences share homology, then the designated output file will present those regions of homology as aligned sequences. If the two compared sequences do not share homology, then the designated output file will not present aligned sequences. The BLAST-like alignment tool (BLAT) may also be used to compare nucleic acid sequences (Kent, Genome Res. 12:656-664, 2002). BLAT is available from several sources, including Kent Informatics (Santa Cruz, Calif.) and on the Internet (genome.ucsc.edu).

[0069] Once aligned, the number of matches is determined by counting the number of positions where an identical nucleotide or amino acid residue is presented in both sequences. The percent sequence identity is determined by dividing the number of matches either by the length of the sequence set forth in the identified sequence, or by an articulated length (such as 100 consecutive nucleotides or amino acid residues from a sequence set forth in an identified sequence), followed by multiplying the resulting value by 100. For example, a nucleic acid sequence that has 1166 matches when aligned with a test sequence having 1554 nucleotides is 75.0 percent identical to the test sequence (1166÷1554*100=75.0). The percent sequence identity value is rounded to the nearest tenth. For example, 75.11, 75.12, 75.13, and 75.14 are rounded down to 75.1, while 75.15, 75.16, 75.17, 75.18, and 75.19 are rounded up to 75.2. The length value will always be an integer. In another example, a target sequence containing a 20-nucleotide region that aligns with 15 consecutive nucleotides from an identified sequence as follows contains a region that shares 75 percent sequence identity to that identified sequence (that is, 15÷20*100=75).

[0070] Subject: Any multi-cellular vertebrate organism, such as human or non-human mammals (e.g., veterinary subjects).

[0071] Target nucleic acid sequence or molecule: A defined region or particular portion of a nucleic acid molecule, for example a portion of a genome (such as a gene or a region of mammalian genomic DNA containing a gene of interest). In an example where the target nucleic acid sequence is a target genomic sequence, such a target can be defined by its position on a chromosome (e.g., in a normal cell), for example, according to cytogenetic nomenclature by reference to a particular location on a chromosome; by reference to its location on a genetic map; by reference to a hypothetical or assembled contig; by its specific sequence or function; by its gene or protein name; or by any other means that uniquely identifies it from among other genetic sequences of a genome. In some examples, the target nucleic acid sequence is mammalian genomic sequence (for example human genomic sequence).

[0072] In some examples, alterations of a target nucleic acid sequence (e.g., genomic nucleic acid sequence) are “associated with” a disease or condition. In some examples, detection of the target nucleic acid sequence can be used to infer the status of a sample with respect to the disease or condition. For example, the target nucleic acid sequence can exist in two (or more) distinguishable forms, such that a first form correlates with absence of a disease or condition and a second (or different) form correlates with the presence of the disease or condition. The two different forms can be qualitatively distinguishable, such as by polynucleotide polymorphisms, and/or the two different forms can be quantitatively distinguishable, such as by the number of copies of the target nucleic acid sequence that are present in a cell.

[0073] Uniquely specific sequence: A nucleic acid sequence (for example, a sequence of at least of at least 20 basepairs (bp) (such as at least 20 bp, 30 bp, 40 bp, 50 bp, 60 bp, 70 bp, 80 bp, 90 bp, 100 bp, or more) that is present only one time in a haploid genome of an organism. In a particular example, a uniquely specific nucleic acid sequence is a nucleic acid sequence from a target nucleic acid that has 100% sequence identity with the target nucleic acid and has no significant identity to any other nucleic acid sequences present in the specific haploid genome that includes the target nucleic acid.

[0074] Vector: Any nucleic acid that acts as a carrier for other (“foreign”) nucleic acid sequences that are not native to the vector. When introduced into an appropriate host cell a vector may replicate itself (and, thereby, the foreign nucleic acid sequence) or express at least a portion of the foreign nucleic acid sequence. In one context, a vector is a linear or circular nucleic acid into which a nucleic acid sequence of interest is introduced (for example, cloned) for the purpose of replication (e.g., production) and/or manipulation using standard recombinant nucleic acid techniques (e.g., restriction digestion). A vector can include nucleic acid sequences that permit it to replicate in a host cell, such as an origin of replication. A vector can also include one or more selectable marker genes and other genetic elements known in the art. Common vectors include, for example, plasmids, cosmids, phage, phagemids, artificial chromosomes (e.g., BAC, PAC, HAC, YAC), and hybrids that incorporate features of more than one of these types of vectors. Typically, a vector includes one or more unique restriction sites (and in some cases a multi-cloning site) to facilitate insertion of a target nucleic acid sequence.

### II. SYSTEMS FOR IN SITU HYBRIDIZATION FOR CHROMOSOME ENUMERATION

### A. Chromosome 3

[0075] The most common target for a control region of chromosome 3 (CHR3) ISH is the centromeric region. The centromeric regions of all human chromosomes are characterized by distinct subsets of a diverse tandemly repeated DNA family, alpha satellite. Since alpha satellite DNA clusters most often contain monomer variants that differ from the consensus sequence by up to 40%, blocking DNA is usually included with the probes to suppress sequences contained within the target loci that are common to other chromosomes.

[0076] Single-stranded probes directed to the control region (centromeric region) of chromosome 3 were designed that achieved acceptable signal intensity levels and background levels within 1 hour of hybridization (see FIG. 4) and without the use of blocking DNA. For example, the probes are configured to achieve a staining intensity of greater than or equal to 2 and staining coverage of greater than or equal to 50% of nuclei. Also designed were single-stranded probes directed to a target region near and within the PIK3CA gene locus that also achieved acceptable signal intensity levels and background levels within 1 hour of hybridization (see FIG. 4) and without the use of blocking DNA. The criteria in Table 3 were used to evaluate whether the ISH assay is acceptable or not acceptable.

TABLE 3

| | Acceptable (A) | Not Acceptable (N) |
|---|---|---|
| Signal | 3, Signals are bright and easily | 1, Specific signals are visible but too |
| Intensity | identified in >80% of cells within the | weak to reliably identify in ≧50% of |
| | target region. | the targeted region. |
| | 2, Specific signals are sufficiently | 0.5, Signals are visible but absent or |
| | intense to reliably identify in >50% | too weak to reliably identify in 80% of |
| | of cells within the targeted region. | cells. |
| | | 0, Signals are not visible. |
| Background | 1, Background signals (either punctate | 3, Background signals (punctate |
| | signals or diffuse, hazy staining) are | signals, diffuse staining, haze) cover |
| | present but are sufficiently weak in | 75-100% of cells within the target |
| | intensity within the nuclei to permit | region and are sufficiently intense to |
| | reliable identification of specific | obscure specific signals. |
| | signals in >50% of cells within the | 2, Background signals (punctate |
| | target region. | signals, diffuse staining, haze) cover |
| | 0, Background staining is not | 50-75% of cells within the target |
| | observed in >80% of cells within the | region and are sufficiently intense to |
| | target region. | obscure specific signals |

[0077] From the perspective of manufacturing and quality control, a single-stranded probe having an exact structure are more reproducibly manufactured using oligonucleotide synthesis compared to the approaches based on PCR, nick translation, or other random synthetic approaches. From the perspective of cost analysis, the probes that do not require blocking DNA provide for a less expensive assay.

[0078] The present disclosure describes systems for ISH featuring a control probe specific to a control region of a chromosome, e.g., a centromere target of a chromosome. The chromosome detected may be chromosome 3, or any other appropriate chromosome. The control probe is configured to achieve a staining intensity of greater than or equal to 2 and staining coverage of greater than or equal to 50% of the number of nuclei within 3 hours when applied to a control sample (e.g., as described above, TABLE 3). In some embodiments, the present invention achieves a staining coverage of ≧55% of the number of nuclei within 3 hours, e.g., ≧60% of the number of nuclei, ≧65% of the number of nuclei, ≧70% of the number of nuclei, ≧75% of the number of nuclei, ≧80% of the number of nuclei, ≧85% of the number of nuclei, ≧90% of the number of nuclei.

[0079] In some embodiments, the systems for ISH also feature a target probe specific for a target region (e.g., for detecting a target gene) on the corresponding chromosome.

[0080] In some embodiments, the control probe comprises a first plurality (e.g., a plurality of a single probe, a plurality of different probes such as a set or pool of probes) of single-stranded oligonucleotide probes. One or more of the plurality of probes may comprise a sequence selected from the group consisting of SEQ ID NOs: 1-18 (see Table 4 below). In some embodiments, one or more of the first plurality of probes comprise a truncated version (e.g., at least 30 contiguous bp, at least 35 contiguous bp, at least 40 contiguous bp, at least 45 contiguous bp, at least 50 contiguous bp, at least 55 contiguous bp, at least 60 contiguous bp, at least 65 contiguous bp, at least 70 contiguous bp, at least 75 contiguous bp, etc.) of one of the sequences in Table 4 (SEQ ID NOs: 1-18). In some embodiments, one or more of the first plurality of probes comprises a sequence that has at least 70% sequence identity, at least 75% sequence identity, at least 80% sequence identity, at least 85% sequence identity, at least 90% sequence identity, or at least 95% sequence identity to one of the sequences in Table 4 (SEQ ID NOs: 1-18). The first plurality of single-stranded oligonucleotide probes is configured to hybridize uniquely and specifically to a portion of the control region of human chromosome 3 so that other chromosomes or portions thereof are not evidently labeled.

[0081] As used herein, reference to use of SEQ ID NOs: 1-18 may also include the use of complementary sequences of SEQ ID NOs: 1-18.

[0082] In some embodiments, the probes target between 2 and 18 distinct portions within the control region. In some embodiments, the probes target between 4 and 18 distinct portions within the control region. In some embodiments, the probes target between 6 and 18 distinct portions within the control region. In some embodiments, the probes target between 8 and 18 distinct portions within the control region. In some embodiments, the probes target between 10 and 18 distinct portions within the control region. In some embodiments, the probes target between 12 and 18 distinct portions within the control region. In some embodiments, the probes target between 14 and 18 distinct portions within the control region. In some embodiments, the probes target between 16 and 18 distinct portions within the control region. In some embodiments, the probes target between 2 and 12 distinct portions within the control region. In some embodiments, the probes target between 4 and 12 distinct portions within the control region. In some embodiments, the probes target between 6 and 12 distinct portions within the control region. In some embodiments, the probes target between 8 and 12 distinct portions within the control region. In some embodiments, the probes target between 10 and 12 distinct portions within the control region.

TABLE 4

| SEQ | | |
|---|---|---|
| ID | | |
| NO: | Sequences | Length |
| 1 | TCTGTGGAATTTGCAAGGGGAGATTTCAAGCACTTTGAGGC | 80 |
| | CATTGGTGGAAAAGGAAATATCTTCGTATGAAAACTAGA | |
| 2 | CAGAATCATTCTCAGGAACTACTTTGTGATATGTGCATTCA | 80 |
| | ACTCCCAGAGTTTAACCTTTCTTTTCATAGATGAGTTTG | |
| 3 | AATGCTAGACAGAAGAATTCTCAGTAACTTCTTTTGGGATG | 80 |
| | TATGTATTCAAATCAGAGAGTTGAACCTTCCTTTAGACA | |
| 4 | GAGCGGATTGGAAACACTCTTTTTGTGGAATTTGCAAGTGG | 80 |
| | AAAATTCTAGCAGTATGAGGCCAATGGTACAAAAGGAAA | |
| 5 | TATCTTCGTATAAAAACTAGACAGTATCATTCTCAGAAACT | 80 |
| | GCTTTGTGATGTGTGTATTAAACTCACAGAGTTGAACAT | |
| 6 | TTCTTTGCATAGAGCAGTTTGGAAAGACTTAGTTTGTGCAG | 80 |
| | TGTGCAAGTGGATATTTGGAACTCTTTGAGGCCTTCGTT | |
| 7 | ATGTGTGCATTCGGCTCACAGAGTTGAACCTTACTTTGGAA | 80 |
| | AGAGCAGTTTTCTAACACTCTTTTTGTAAAAGTTCCAAG | |
| 8 | TGAATACTTTGAGTGCTTTGAAGCCTACGGTTGACAACGAA | 80 |
| | ATATCTTCCTGTAAAAACTACAAAGAATCATTCGCAGAA | |
| 9 | ACCACGTTGTGATCTCTGCATTCAACTCACAGAGTTCAACC | 80 |
| | TTTCTTCCTATAGAGCAGTTATGAAACAGTCTCTTTGTA | |
| 10 | GAATTTGCAAGGGTGTATTTAGAGGGCATTGAAGCCTACG | 80 |
| | GTAGAAAAGGAAATATCTTACCATAAAATCTAGTCAGAAG | |
| 11 | CATTCTCAGCAACTGAGTTGTGATGTTTGCATTCAACTCAC | 80 |
| | AGAGTTCAACATTCCTTTTAATGGAGCGGTTTTGAAACA | |
| 12 | ATTGGAAACACTCTTTTTGTGGAATTTTCAGGTGGAGGTAT | 80 |
| | CAAGCGCTTTGAGGCCAATGATAGAAAAGGAAATACCTT | |
| 13 | CGTATAATAATTAGACGGAATCATTCTCAGAAACCGCTTTG | 80 |
| | CAATGTGTGCGTTCAACTCACAGTGTTTAACCTTTCTTT | |
| 14 | TCATACAAGTTGTTTCGAAACACTCTTTTTGCAGAATCTGC | 80 |
| | AAGTGGATATTTGGACCTCTTTGAAGTCTTCGTTGGAAA | |
| 15 | GCCTTCGTAGTAAACGGGATTTCTTCGTGTAATGATAGACA | 80 |
| | ATAGAATTCTCAGTGAATTTTTTTCTGTGTGTGTGTATT | |
| 16 | TTGAGTGAATGGTAGGAAAGGAAATACCTTCGTATAAAA | 80 |
| | ACTAGACGGAGTCATTCTCAGAAACTACTTTGTGATGTTT | |
| 17 | ATTTGCAAGTGGAGAATTCTAGCGCTTTGACGCCAATGGTA | 80 |
| | GAAAGGAAATATCTTCGTATAAAAACTAGACAGTATCAT | |
| 18 | CGGTTGGAAACACTTTTTGTGGAATTTTCAGGGGGAGACTT | 80 |
| | CAAGCGCTTTGAAGTGAATGGTAGGAAAGGAAATACCTT | |

[0083] The first plurality of single-stranded oligonucleotide probes may be constructed in a variety of lengths. For example, in some embodiments, the probes each comprise between 40 to 100 nucleotides. In some embodiments, the probes each comprise between 50 to 100 nucleotides. In some embodiments, the probes each comprise between 60 to 110 nucleotides. In some embodiments, the probes each comprise between 40 to 120 nucleotides. In some embodiments, the probes each comprise at least 40 nucleotides. In some embodiments, the probes each comprise at least 50 nucleotides. In some embodiments, the probes each comprise at least 60 nucleotides. In some embodiments, the probes each comprise at least 70 nucleotides.

[0084] The present invention also features slides with a plurality of nuclei stained for a chromosome control, e.g., CHR3 control. The slide may be contacted with one or more of the above systems (e.g., probes). The slide features enumerable signals indicative of the number of chromosome 3 centromere regions present in a cell, e.g., cells should exhibit two copies of the CHR3 centromere normally.

[0085] In some embodiments, more than 50% of the nuclei have enumerable signals for the chromosome. An enumerable signal may be a generally round shape. The round shape can be defined as shown in FIGS. 14A and 14B, wherein a round shape is a simple closed curve that fits within a first region, the first region lies on and outside an inner circle and on and inside a concentric outer circle, the inner circle has an inner radius (Rᵢₙ) and the outer circle has an outer radius (Rₒᵤₜ), wherein the simple close curve has a radius Rₛᵢₘₚₗₑ, wherein Rᵢₙ≦Rₛᵢₘₚₗₑ≦Rₒᵤₜ, and wherein, Rᵢₙ is ≧50% of Rₒᵤₜ. One aspect of the round shape is that it is a condensed signal compared to a diffuse signal. The hybridization of the probe to the target may not form a round signal at a very high magnification, but with a chromogenic deposition and at lower magnifications (e.g. those customary within the anatomic pathology laboratory, 100×, 600×) the signal appears round. The parameters of a generally round shape are specified so as to distinguish the signals associated with the present probes to those previously possible. Another aspect of the present disclosure is that the extent to which the signals are in a generally round shape, condensed, and regular, the ability to read the signals by either a pathologist or using a machine reader, is enhanced.

[0086] In some embodiments, the inner radius is no less than 40% of the outer radius. In some embodiments, the inner radius is no less than 50% of the outer radius. In some embodiments, the inner radius is no less than 55% of the outer radius. In some embodiments, the inner radius is no less than 60% of the outer radius. In some embodiments, the inner radius is no less than 65% of the outer radius. In some embodiments, the inner radius is no less than 70% of the outer radius. In some embodiments, the inner radius is no less than 75% of the outer radius. In some embodiments, the inner radius is no less than 80% of the outer radius. In some embodiments, the inner radius is no less than 85% of the outer radius. In some embodiments, the inner radius is no less than 90% of the outer radius.

[0087] In some embodiments, more than 60% of the nuclei have enumerable signals for the chromosome. In some embodiments, more than 70% of the nuclei have enumerable signals for the chromosome. In some embodiments, more than 80% of the nuclei have enumerable signals for the chromosome. In some embodiments, more than 90% of the nuclei have enumerable signals for the chromosome. The nuclei may not be enumerable if the tissue sectioning process has destroyed that portion of the cell, if that portion of the cell is divided between two slides, or if that portion of the cell is wholly within a separate slide. The nuclei may also be enumerable if the tissue condition prevents probe penetration to the specific binding site (i.e. the cell is not sufficiently accessible to the probe) or if the target region of DNA is substantially degraded.

[0088] In some embodiments, the sum of the surface area covered by staining signal is calculated and assigned a 100% value, and at least 50% of the sum of the surface area is derived from discrete round signals (or round shapes).

[0089] A round shape can be defined as shown in FIGS. 14A and 14B, wherein a round shape is a simple closed curve that fits within a first region, the first region lies on and outside an inner circle and on and inside a concentric outer circle, the inner circle has an inner radius (Rᵢₙ) and the outer circle has a outer radius (Rₒᵤₜ), wherein the simple close curve has a radius Rₛᵢₘₚₗₑ, wherein Rᵢₙ≦Rₛᵢₘₚₗₑ≦Rₒᵤₜ, and wherein, Rᵢₙ is ≧50% of Rₒᵤₜ.

[0090] In some embodiments, the inner radius is no less than 50% of the outer radius. In some embodiments, more than 60% of said sum of the surface area is derived from discrete round signals. In some embodiments, more than 70% of said sum of the surface area is derived from discrete round signals. In some embodiments, the inner radius is no less than 60% of the outer radius. In some embodiments, the inner radius is no less than 75% of the outer radius. In some embodiments, the inner radius is no less than 90% of the outer radius.

[0091] Referring to FIG. 12-13, the radii (e.g., outer radii) of a plurality of signals were measured. In some embodiments, the outer radius is between about 0.25 to 0.675 μm. In some embodiments, the outer radius is between about 0.2 to 0.75 μm. In some embodiments, the outer radius is between about 0.15 to 1 μm. In some embodiments, the average outer radius of the enumerable signals is between about 0.2 to 0.75 μm. In some embodiments, the average outer radius of the enumerable signals has a standard deviation of less than 0.5 μm. In some embodiments, the average outer radius of the enumerable signals has a standard deviation of less than 0.25 μm.

[0092] In some embodiments, the enumerable round signals are mono-sized. As used herein, a population of “mono-sized” round signals have the Rₛᵢₘₚₗₑ being within 15% plus or minus of each other. In some embodiments, the population of “mono-sized” round signals have the Rₛᵢₘₚₗₑ being within 10% plus or minus of each other. In some embodiments, the population of “mono-sized” round signals have the Rₛᵢₘₚₗₑ being within 5% plus or minus of each other.

### B. Target Gene (PIK3CA)

[0093] In some embodiments, the systems for ISH also feature a target probe specific for a target region (e.g., for detecting a target gene, for gene copy enumeration) on the corresponding chromosome.

[0094] The target region may comprise the PIK3CA gene locus (or nearby nucleotides). Disclosed herein are probes directed to the human PIK3CA gene (e.g., Gene ID No. 5290; NC_000003.11 (178866311 . . . 178952500)), which is incorporated herein by reference as present in GENBANK® on Apr. 30, 2012) and depicted in FIG. 1. As described below in detail in EXAMPLE 1, the PIK3CA target probe is specific to a region between nucleotides 178,640,071 and 179,399,807 of human chromosome 3.

[0095] In some embodiments, the target probe comprises a second plurality (e.g., a plurality of a single probe, a plurality of different probes such as a set or pool of probes) of single-stranded oligonucleotide probes. One or more of the plurality of probes may comprise a sequence selected from the group consisting of SEQ ID NOs: 19-1230 (see FIGS. 14A and 14B). The second plurality of single-stranded oligonucleotide probes is configured to hybridize uniquely and specifically to a portion of the target region of the corresponding chromosome so that other genes or chromosomes or portions thereof are not evidently labeled.

### III. KITS

[0096] Also disclosed are kits including one or more of the oligonucleotide probes (for example, one or more of SEQ ID NOs: 1-18). For example, kits can include at least one probe (such as at least 1, 2, 3, 4, 5, 6, 7, 8, 9, 10, or more probes) or at least one probe set (such as at least 1, 2, 3, 4, or 5 probe sets) as described herein. In one example, the kit comprises probes such as at least 1, 2, 3, 4, 5, 6, 7, 8, 9, 10, 11, 12, 13, 14, 15, 16, 17 or all of SEQ ID NOs: 1-18 (or sequences at least 60%, at least 70%, at least 75%, at least 80%, at least 85%, or at least 90% identical to SEQ ID NOs: 1-18; or truncated versions of SEQ ID NOs: 1-18). In other examples, the probes (or the probe set) are in a single container.

[0097] The kits may also comprise one or more reagents for detecting the probe (for example, by in situ hybridization), or for producing a detectably labeled probe. For example, a kit can include at least one of the disclosed nucleic acid probes or probe sets, along with one or more buffers, labeled dNTPs, a labeling enzyme (such as a polymerase), primers, nuclease free water, and instructions for producing a labeled probe. In another example, the kit includes one or more of the disclosed nucleic acid probes (unlabeled or labeled) along with buffers and other reagents for performing in situ hybridization. For example, if one or more unlabeled probes are included in the kit, labeling reagents can also be included, along with specific detection agents (for example, fluorescent, chromogenic, luminescent and/or radiometric) and other reagents for performing an in situ hybridization assay, such as paraffin pretreatment buffer, protease(s) and protease buffer, prehybridization buffer, hybridization buffer, wash buffer, counterstain(s), mounting medium, or combinations thereof. In some examples, such kit components are present in separate containers. The kit can optionally further include control slides (such as positive or negative controls) for assessing hybridization and signal of the probe(s).

[0098] In certain examples, the kits include avidin, antibodies, and/or receptors (or other anti-ligands). Optionally, one or more of the detection agents (including a primary detection agent, and optionally, secondary, tertiary or additional detection reagents) are labeled, for example, with a hapten or fluorophore (such as a fluorescent dye or quantum dot). In some instances, the detection reagents are labeled with different detectable moieties (for example, different fluorescent dyes, spectrally distinguishable quantum dots, different haptens, etc.). For example, a kit can include two or more nucleic acid probes or probe sets that correspond to and are capable of hybridizing to different target nucleic acids (for example, any of the target nucleic acids disclosed herein). The first probe or probe set can be labeled with a first detectable label (e.g., hapten, fluorophore, etc.), the second probe or probe set can be labeled with a second detectable label, and any additional probes or probe sets (e.g., third, fourth, fifth, etc.) can be labeled with additional detectable labels. The first, second, and any subsequent probes or probe sets can be labeled with different detectable labels, although other detection schemes are possible. If the probe(s) are labeled with indirectly detectable labels, such as haptens, the kits can include detection agents (such as labeled avidin, antibodies or other specific binding agents) for some or all of the probes. In one embodiment, the kit includes probes and detection reagents suitable for multiplex ISH.

[0099] In one example, the kit also includes an antibody conjugate, such as an antibody conjugated to a label (e.g., an enzyme, fluorophore, or fluorescent nanoparticle). In some examples, the antibody is conjugated to the label through a linker, such as PEG, 6×-His, streptavidin, or GST.

### IV. DETECTABLE LABELS AND METHODS OF LABELING

[0100] The probes disclosed herein may comprise one or more labels (e.g., at least 1 at least 2, at least 3, at least 4, at least 5, at least 6, etc.), for example to permit detection of the probe/nucleic acid sequence (or region) of interest. In various applications, such as in situ hybridization procedures, a nucleic acid probe includes a label (e.g., a detectable label). A “detectable label” is a molecule or material that can be used to produce a detectable signal that indicates the presence or concentration of the probe (particularly the bound or hybridized probe) in a sample. Thus, a labeled nucleic acid molecule provides an indicator of the presence or quantity (for example, gene copy number) of a target nucleic acid (to which the labeled uniquely specific nucleic acid molecule is bound or hybridized) in a sample. The disclosure is not limited to the use of particular labels, although examples are provided.

[0101] A label associated with one or more nucleic acid molecules (such as the disclosed probes) can be detected either directly or indirectly. A label can be detected by any known or yet to be discovered mechanism including absorption, emission and/or scattering of a photon (including radio frequency, microwave frequency, infrared frequency, visible frequency and ultra-violet frequency photons). Detectable labels include colored, fluorescent, phosphorescent and luminescent molecules and materials, catalysts (such as enzymes) that convert one substance into another substance to provide a detectable difference (such as by converting a colorless substance into a colored substance or vice versa, or by producing a precipitate or increasing sample turbidity), haptens that can be detected by antibody binding interactions, and paramagnetic and magnetic molecules or materials.

[0102] Particular examples of detectable labels include fluorescent molecules (or fluorochromes). Numerous fluorochromes are known to those of skill in the art, and can be selected, for example from Life Technologies, e.g., see, The Handbook—A Guide to Fluorescent Probes and Labeling Technologies. Examples of particular fluorophores that can be attached (for example, chemically conjugated) to a nucleic acid molecule (such as a uniquely specific binding region) are provided in U.S. Pat. No. 5,866,366 to Nazarenko et al., such as 4-acetamido-4′-isothiocyanatostilbene-2,2′ disulfonic acid, acridine and derivatives such as acridine and acridine isothiocyanate, 5-(2′-aminoethyl)aminonaphthalene-1-sulfonic acid (EDANS), 4-amino-N-[3-vinylsulfonyl)phenyl]naphthalimide-3,5 disulfonate (Lucifer Yellow VS), N-(4-anilino-1-naphthyl)maleimide, anthranilamide, Brilliant Yellow, coumarin and derivatives such as coumarin, 7-amino-4-methylcoumarin (AMC, Coumarin 120), 7-amino-4-trifluoromethylcouluarin (Coumarin 151); cyanosine; 4′,6-diaminidino-2-phenylindole (DAPI); 5′, 5″-dibromopyrogallol-sulfonephthalein (Bromopyrogallol Red); 7-diethylamine-3-(4′-isothiocyanatophenyl)-4-methylcoumarin; diethylenetriamine pentaacetate; 4,4′-diisothiocyanatodihydro-stilbene-2,2′-disulfonic acid; 4,4′-diisothiocyanatostilbene-2,2′-disulfonic acid; 5-[dimethylamino]naphthalene-1-sulfonyl chloride (DNS, dansyl chloride); 4-(4′-dimethylaminophenylazo)benzoic acid (DABCYL); 4-dimethylaminophenylazophenyl-4′-isothiocyanate (DABITC); eosin and derivatives such as eosin and eosin isothiocyanate; erythrosin and derivatives such as erythrosin B and erythrosin isothiocyanate; ethidium; fluorescein and derivatives such as 5-carboxyfluorescein (FAM), 5-(4,6-dichlorotriazin-2-yl)aminofluorescein (DTAF), 2′7′-dimethoxy-4′5′-dichloro-6-carboxyfluorescein (JOE), fluorescein, fluorescein isothiocyanate (FITC), and QFITC (XRITC); 2′, 7′-difluorofluorescein (OREGON GREEN®); fluorescamine; IR144; IR1446; Malachite Green isothiocyanate; 4-methylumbelliferone; ortho-cresolphthalein; nitrotyrosine; pararosaniline; Phenol Red; B-phycoerythrin; o-phthaldialdehyde; pyrene and derivatives such as pyrene, pyrene butyrate and succinimidyl 1-pyrene butyrate; Reactive Red 4 (Cibacron Brilliant Red 3B-A); rhodamine and derivatives such as 6-carboxy-X-rhodamine (ROX), 6-carboxyrhodamine (R6G), lissamine rhodamine B sulfonyl chloride, rhodamine (Rhod), rhodamine B, rhodamine 123, rhodamine X isothiocyanate, rhodamine green, sulforhodamine B, sulforhodamine 101 and sulfonyl chloride derivative of sulforhodamine 101 (Texas Red); N,N,N′,N′-tetramethyl-6-carboxyrhodamine (TAMRA); tetramethyl rhodamine; tetramethyl rhodamine isothiocyanate (TRITC); riboflavin; rosolic acid and terbium chelate derivatives.

[0103] Other suitable fluorophores include thiol-reactive europium chelates, which emit at approximately 617 nm (Heyduk and Heyduk, Analyt. Biochem. 248:216-27, 1997; J. Biol. Chem. 274:3315-22, 1999), as well as GFP, Lissamine™, diethylaminocoumarin, fluorescein chlorotriazinyl, naphthofluorescein, 4,7-dichlororhodamine and xanthene (as described in U.S. Pat. No. 5,800,996 to Lee et al.) and derivatives thereof. Other fluorophores known to those skilled in the art can also be used, for example those available from Life Technologies (Carlsbad, Calif.) and including the ALEXA FLUOR® series of dyes (for example, as described in U.S. Pat. Nos. 5,696,157, 6,130,101 and 6, 716,979), the BODIPY series of dyes (dipyrrometheneboron difluoride dyes, for example as described in U.S. Pat. Nos. 4,774,339, 5,187,288, 5,248,782, 5,274,113, 5,338,854, 5,451,663 and 5,433,896), Cascade Blue (an amine reactive derivative of the sulfonated pyrene described in U.S. Pat. No. 5,132,432) and Marina Blue (U.S. Pat. No. 5,830,912). In addition to the fluorochromes described above, a fluorescent label can be a fluorescent nanoparticle, such as a semiconductor nanocrystal, e.g., a quantum dot. Additional labels include, for example, radioisotopes (such as 3H), metal chelates such as DOTA and DPTA chelates of radioactive or paramagnetic metal ions like Gd3+, and liposomes.

[0104] Detectable labels that can be used with nucleic acid molecules (such as the disclosed probes) also include enzymes, for example horseradish peroxidase (HRP), alkaline phosphatase (AP), acid phosphatase, glucose oxidase, β-galactosidase, β-glucuronidase, or β-lactamase. Where the detectable label includes an enzyme, a chromogen, fluorogenic compound, or luminogenic compound can be used in combination with the enzyme to generate a detectable signal (numerous of such compounds are commercially available, for example, from Life Technologies). Particular examples of chromogenic compounds include diaminobenzidine (DAB), 4-nitrophenylphosphate (pNPP), fast red, fast blue, bromochloroindolyl phosphate (BCIP), nitro blue tetrazolium (NBT), BCIP/NBT, AP Orange, AP blue, tetramethylbenzidine (TMB), 2,2′-azino-di-[3-ethylbenzothiazoline sulphonate] (ABTS), o-dianisidine, 4-chloronaphthol (4-CN), nitrophenyl-β-D-galactopyranoside (ONPG), o-phenylenediamine (OPD), 5-bromo-4-chloro-3-indolyl-β-galactopyranoside (X-Gal), methylumbelliferyl-β-D-galactopyranoside (MU-Gal), p-nitrophenyl-α-D-galactopyranoside (PNP), 5-bromo-4-chloro-3-indolyl-β-D-glucuronide (X-Gluc), 3-amino-9-ethyl carbazol (AEC), fuchsin, iodonitrotetrazolium (INT), tetrazolium blue, and tetrazolium violet.

[0105] Alternatively, an enzyme can be used in a metallographic detection scheme. For example, silver in situ hybridization (SISH) procedures involve metallographic detection schemes for identification and localization of a hybridized genomic target nucleic acid sequence. Metallographic detection methods include using an enzyme, such as alkaline phosphatase, in combination with a water-soluble metal ion and a redox-inactive substrate of the enzyme. The substrate is converted to a redox-active agent by the enzyme, and the redox-active agent reduces the metal ion, causing it to form a detectable precipitate. (See, for example, U.S. Pat. No. 7,632,652,). Metallographic detection methods also include using an oxido-reductase enzyme (such as horseradish peroxidase) along with a water soluble metal ion, an oxidizing agent and a reducing agent, again to form a detectable precipitate. (See, for example, U.S. Pat. No. 6,670,113).

[0106] In non-limiting examples, the disclosed nucleic acid probes are labeled with dNTPs covalently attached to hapten molecules (such as a nitro-aromatic compound (e.g., 2,4-dinitrophenyl (DNP)), biotin, fluorescein, digoxigenin (DIG), etc.). Additional haptens suitable for labeling the disclosed probes include nitropyrazole, 3-hydroxyquinoxaline, thiazolesulfonamide, nitrocinnamic acid, rotenone, 7-(diethylamino)coumarin-3-carboxylic acid, benzodiazepine, or benzofuran haptens (see, e.g., International Pat. Publ. No. WO 2012/003476 incorporated herein by reference). Methods for conjugating haptens and other labels to dNTPs (e.g., to facilitate incorporation into labeled probes) are well known in the art. For examples of procedures, see, e.g., U.S. Pat. Nos. 5,258,507, 4,772,691, 5,328,824, and 4,711,955. Indeed, numerous labeled dNTPs are available commercially, for example from Life Technologies (Carlsbad, Calif.). A label can be directly or indirectly attached to a dNTP at any location on the dNTP, such as a phosphate (e.g., α, β or γ phosphate) or a sugar.

[0107] Detection of labeled nucleic acid molecules can be accomplished by contacting the hapten-labeled nucleic acid molecules bound to the genomic target nucleic acid with a primary anti-hapten antibody. In one example, the primary anti-hapten antibody (such as a mouse anti-hapten antibody) is directly labeled with an enzyme. In another example, a secondary anti-species antibody (such as a goat anti-mouse IgG antibody) conjugated to an enzyme is used for signal amplification. In chromogenic in situ hybridization CISH a chromogenic substrate is added, for SISH, silver ions and other reagents as outlined in the referenced patents/applications are added.

[0108] In some examples, a probe is labeled by incorporating one or more labeled dNTPs using an enzymatic (polymerization) reaction. For example, the disclosed nucleic acid probes (for example, incorporated into a plasmid vector) can be labeled by nick translation (using, for example, biotin, DNP, digoxigenin, etc.) or by random primer extension with terminal transferase (e.g., 3′ end tailing). In some examples, the nucleic probe is labeled by a modified nick translation reaction where the ratio of DNA polymerase I to deoxyribonuclease I (DNase I) is modified to produce greater than 100% of the starting material. In particular examples, the nick translation reaction includes DNA polymerase I to DNase I at a ratio of at least about 800:1, such as at least 2000:1, at least 4000:1, at least 8000:1, at least 10,000:1, at least 12,000:1, at least 16,000:1, such as about 800:1 to 24,000:1 and the reaction is carried out overnight (for example, for about 16-22 hours) at a substantially isothermal temperature, for example, at about 16° C. to 25° C. (such as room temperature). If the probe is included in a probe set (for example, multiple plasmids, such as 2, 3, 4, 5, 6, 7, 8, 9, 10, or more plasmids), the plasmids may be mixed in an equal molar ratio prior to performing the labeling reaction (such as nick translation or modified nick translation).

[0109] In other examples, chemical labeling procedures can also be employed. Numerous reagents (including hapten, fluorophore, and other labeled nucleotides) and other kits are commercially available for enzymatic labeling of nucleic acids, including the disclosed nucleic acid probes. As will be apparent to those of skill in the art, any of the labels and detection procedures disclosed above are applicable in the context of labeling a probe, e.g., for use in in situ hybridization reactions. For example, the Amersham MULTIPRIME® DNA labeling system, various specific reagents and kits available from Molecular Probes/Life Technologies, or any other similar reagents or kits can be used to label the nucleic acids disclosed herein. In particular examples, the disclosed probes can be directly or indirectly labeled with a hapten, a ligand, a fluorescent moiety (e.g., a fluorophore or a semiconductor nanocrystal), a chromogenic moiety, or a radioisotope. For example, for indirect labeling, the label can be attached to nucleic acid molecules via a linker (e.g., PEG or biotin). Additional methods that can be used to label probe nucleic acid molecules are provided in U.S. Pat. No. 7,541,455.

### V. METHODS FOR IN SITU HYBRIDIZATION FOR CHROMOSOME ENUMERATION

[0110] The present invention also features in situ hybridization (ISH) assays, e.g., bright-field ISH assays, for detection of a gene target and a chromosome (e.g., centromere target of a chromosome) using single-strand oligonucleotide probes. For example, a method comprises contacting a tissue sample with a control probe specific to a control region of a chromosome (e.g., chromosome 3), wherein the control probe is a single-stranded oligonucleotide probe labeled with at least one first label. The control probe may be configured to achieve a staining intensity of ≧2 and staining coverage of ≧50% of nuclei within 3 hours when applied to a control sample. The method further comprises hybridizing the control probe to the control region under conditions for a period of time less than about 3 hours (e.g., ≦about 2.5 hours, ≦about 2 hours, ≦about 1.5 hour, or ≦about 1 hour), rinsing the sample to remove unbound probe, and detecting the presence of the hybridized probe.

[0111] In some embodiments, the method further comprises contacting the tissue sample with a target probe specific to a target region (e.g., PIK3CA) of the chromosome, wherein the target probe is a single-stranded oligonucleotide probe labeled with at least one second label.

[0112] In some embodiments, the method further comprises applying chromogenic detection reagents that recognize the first label and amplify the signal associated with said first label. The method may feature the use of one or more probes (e.g., SEQ ID NOs: 1-18) or systems as described herein.

[0113] Genome-specific blocking DNA (such as human DNA, for example, total human placental DNA or Cot-1™ DNA) is usually included in a hybridization solution (such as for in situ hybridization) to suppress probe hybridization to repetitive DNA sequences or to counteract probe hybridization to highly homologous (frequently identical) off target sequences when a probe complementary to a human genomic target nucleic acid is utilized. In hybridization with standard probes, in the absence of genome-specific blocking DNA, an unacceptably high level of background staining (for example, non-specific binding, such as hybridization to non-target nucleic acid sequence) is usually present, even when a “repeat-free” probe is used. The disclosed nucleic acid probes exhibit reduced background staining, even in the absence of blocking DNA. In particular examples, the hybridization solution including the disclosed probes does not include genome-specific blocking DNA (for example, total human placental DNA or Cot-1™ DNA, if the probe is complementary to a human genomic target nucleic acid). This advantage is derived from the uniquely specific nature of the target sequences included in the nucleic acid probe; each labeled probe sequence binds only to the cognate uniquely specific genomic sequence. This results in dramatic increases in signal to noise ratios for ISH techniques.

[0114] As such, some methods herein may be free from the use of blocking DNA. However, in some embodiments, blocking DNA may be used. In some embodiments, an amount of blocking DNA is used but the amount of blocking DNA is sufficient to block out no more than a specified percent of the non-specific binding, e.g., no more than 50%, 40%, 30%, 20%, or 10%.

[0115] In order to determine an amount of blocking DNA that is sufficient to block out no more than a specified percent (e.g., 50%) of the non-specific binding, the following tests may be conducted. Set up an in situ hybridization assay, contact a tissue sample with a double strand (e.g. DNA) control probe specific to a control region of a chromosome (in combination with zero to a serially, gradually increasing amount of blocking DNA); hybridize the double strand control probe to the control region; rinse the sample to remove unbound double strand probe; and detect the presence of the hybridized probe. Then observe the amount of background that is blocked by the serially increasing blocking DNA in each assay. The amount of blocking DNA that achieves a specified percent of the blocking of the background corresponds to the amount of blocking DNA that is sufficient to block out no more than a specified percent (e.g., 50%) of the non-specific binding. For example, the amount of blocking DNA that achieves blocking out 50% of percent of the background corresponds to the amount of blocking DNA that is sufficient to block out no more than 50% of the non-specific binding.

[0116] In some embodiments, said amount of blocking DNA is between about 1 pg/ml to 1 mg/ml. In some embodiments, said amount of blocking DNA is between about 1 pg/ml to 0.5 mg/ml. In some embodiments, said amount of blocking DNA is between about 1 pg/ml to 0.25 mg/ml. In some embodiments, said amount of blocking DNA is between about 1 pg/ml to 1 μg/ml.

[0117] In some illustrative embodiments, methods for obtaining two bright-field chromogenic in situ hybridization signals per cell may comprise contacting a tissue sample containing a plurality of cells with a control probe specific to a control region of a single chromosome, the probe selected so as to not evidently bind non-specifically in the absence of blocking DNA; hybridizing the control probe to the control region of said chromosome; rinsing the sample to remove unbound probe; and detecting the presence of the hybridized probe via a chromogenic reagent so as to generate two bright-field chromogenic in situ hybridization signals per cell. In order to determine that the selected probe does not evidently bind non-specifically in the absence of blocking DNA, a comparative assay (Assay 2) may be conducted along side with the aforementioned assay (Assay 1), wherein the same selected probe is employed in both Assay 1 and Assay 2. Assay 1 is free of the blocking DNA and Assay 2 employs a blocking DNA. Then the respective data of the two assays are compared. The selected probe does not evidently bind non-specifically in the absence of blocking DNA when the data of the two respective assays are the same or substantially the same.

[0118] In some examples the hybridization solution may contain carrier DNA from a different organism (for example, salmon sperm DNA or herring sperm DNA, if the genomic target nucleic acid is a human genomic target nucleic acid) to reduce non-specific binding of the probe to non-DNA materials (for example to reaction vessels or slides) with high net positive charge which can non-specifically bind to the negatively charged probe DNA.

[0119] Methods of the present invention may comprise detecting signals wherein more than 50% of the nuclei of the tissue sample have enumerable signals for said chromosome, wherein an enumerable signal is a generally round shape (e.g., as described above). In some embodiments, background signals are not observed in >70% of cells of the tissue sample. In some embodiments, background signals are not observed in >80% of cells of the tissue sample. In some embodiments, background signals are not observed in >90% of cells of the tissue sample. In some embodiments, background signals are present but are sufficiently weak in intensity so as to permit identification of enumerable signals in >50% of the nuclei.

[0120] In some embodiments, more than 60% of the nuclei have enumerable chromosome signals. In some embodiments, more than 70% of the nuclei have enumerable chromosome signals. In some embodiments, the inner radius is no less than 60% of the outer radius. In some embodiments, the inner radius is no less than 75% of the outer radius. In some embodiments, the inner radius is no less than 90% of the outer radius.

[0121] In situ hybridization (ISH) involves contacting a sample containing a target nucleic acid (e.g., a genomic target nucleic acid) in the context of a metaphase or interphase chromosome preparation (such as a cell or tissue sample mounted on a slide) with a labeled probe specifically hybridizable or specific for the target nucleic acid (for example, one or more of the probes disclosed herein). The slides are optionally pretreated, e.g., to remove paraffin or other materials that can interfere with uniform hybridization. The chromosome sample and the probe are both treated, for example by heating to denature the double stranded nucleic acids. The probe (formulated in a suitable hybridization buffer) and the sample are combined, under conditions and for sufficient time to permit hybridization to occur (typically to reach equilibrium). The chromosome preparation is washed to remove excess probe, and detection of specific labeling of the target is performed using standard techniques.

[0122] For example, a biotinylated probe can be detected using fluorescein-labeled avidin or avidin-alkaline phosphatase. For fluorochrome detection, the fluorochrome can be detected directly, or the samples can be incubated, for example, with fluorescein isothiocyanate (FITC)-conjugated avidin. Amplification of the FITC signal can be effected, if necessary, by incubation with biotin-conjugated goat anti-avidin antibodies, washing and a second incubation with FITC-conjugated avidin. For detection by enzyme activity, samples can be incubated, for example, with streptavidin, washed, incubated with biotin-conjugated alkaline phosphatase, washed again and pre-equilibrated (e.g., in alkaline phosphatase (AP) buffer). The enzyme reaction can be performed in, for example, AP buffer containing NBT/BCIP and stopped by incubation in 2×SSC. For a general description of in situ hybridization procedures, see, e.g., U.S. Pat. No. 4,888,278.

[0123] Numerous procedures for FISH, CISH, and SISH are known in the art. For example, procedures for performing FISH are described in U.S. Pat. Nos. 5,447,841; 5,472,842; and 5,427,932 CISH is described in U.S. Pat. No. 6,942,970, and additional detection methods are provided in U.S. Pat. No. 6,280,929.

[0124] Numerous reagents and detection schemes can be employed in conjunction with FISH, CISH, and SISH procedures to improve sensitivity, resolution, or other desirable properties. As discussed above, probes labeled with fluorophores (including fluorescent dyes and quantum dots) can be directly optically detected when performing FISH. Alternatively, the probe can be labeled with a non-fluorescent molecule, such as a hapten (such as the following non-limiting examples: biotin, digoxigenin, DNP, and various oxazoles, pyrrazoles, thiazoles, nitroaryls, benzofurazans, triterpenes, ureas, thioureas, rotenones, coumarin, courmarin-based compounds, Podophyllotoxin, Podophyllotoxin-based compounds, and combinations thereof), ligand or other indirectly detectable moiety. Probes labeled with such non-fluorescent molecules (and the target nucleic acid sequences to which they bind) can then be detected by contacting the sample (e.g., the cell or tissue sample to which the probe is bound) with a labeled detection reagent, such as an antibody (or receptor, or other specific binding partner) specific for the chosen hapten or ligand. The detection reagent can be labeled with a fluorophore (e.g., quantum dot) or with another indirectly detectable moiety, or can be contacted with one or more additional specific binding agents (e.g., secondary or specific antibodies), which can in turn be labeled with a fluorophore. Optionally, the detectable label is attached directly to the antibody, receptor (or other specific binding agent).

[0125] Alternatively, the detectable label is attached to the binding agent via a linker, such as a hydrazide thiol linker, a polyethylene glycol linker, or any other flexible attachment moiety with comparable reactivities. For example, a specific binding agent, such as an antibody, a receptor (or other anti-ligand), avidin, or the like can be covalently modified with a fluorophore (or other label) via a heterobifunctional polyalkyleneglycol linker such as a heterobifunctional polyethyleneglycol (PEG) linker. A heterobifunctional linker combines two different reactive groups selected, e.g., from a carbonyl-reactive group, an amine-reactive group, a thiol-reactive group and a photo-reactive group, the first of which attaches to the label and the second of which attaches to the specific binding agent.

[0126] In other examples, the probe, or specific binding agent (such as an antibody, e.g., a primary antibody, receptor or other binding agent) is labeled with an enzyme that is capable of converting a fluorogenic or chromogenic composition into a detectable fluorescent, colored or otherwise detectable signal (e.g., as in deposition of detectable metal particles in SISH). As indicated above, the enzyme can be attached directly or indirectly via a linker to the relevant probe or detection reagent. Examples of suitable reagents (e.g., binding reagents) and chemistries (e.g., linker and attachment chemistries) are described in U.S. Patent Application Publication Nos. 2006/0246524; 2006/0246523, and 2007/0117153.

[0127] In further examples, a signal amplification method is utilized, for example, to increase sensitivity of the probe. For example, tyramide signal amplification may be utilized (See U.S. Pat. No. 5,196,306). In one variation of this method a biotinylated nucleic acid probe detects the presence of a target by binding thereto. Next a streptavidin-peroxidase conjugate is added. The streptavidin binds to the biotin. A substrate of biotinylated tyramide (tyramine is 4-(2-aminoethyl)phenol) is used, which presumably becomes a free radical when interacting with the peroxidase enzyme. The phenolic radical then reacts quickly with the surrounding material, thus depositing or fixing biotin in the vicinity. This process is repeated by providing more substrate (biotinylated tyramide) and building up more localized biotin. Finally, the “amplified” biotin deposit is detected with streptavidin attached to a fluorescent molecule. Alternatively, the amplified biotin deposit can be detected with avidin-peroxidase complex, that is then fed 3,3′-diaminobenzidine to produce a brown color. It has been found that tyramide attached to fluorescent molecules also serve as substrates for the enzyme, thus simplifying the procedure by eliminating steps. Yet another amplification approach is described in U.S. Patent Publ. No. 2013/0260379.

[0128] In other examples, the signal amplification method utilizes branched DNA (bDNA) signal amplification. In some examples, target-specific oligonucleotides (label extenders and capture extenders) are hybridized with high stringency to the target nucleic acid. Capture extenders are designed to hybridize to the target and to capture probes, which are attached to a microwell plate. Label extenders are designed to hybridize to contiguous regions on the target and to provide sequences for hybridization of a preamplifier oligonucleotide. Signal amplification then begins with preamplifier probes hybridizing to label extenders. The preamplifier forms a stable hybrid only if it hybridizes to two adjacent label extenders. Other regions on the preamplifier are designed to hybridize to multiple bDNA amplifier molecules that create a branched structure. Finally, alkaline phosphatase (AP)-labeled oligonucleotides, which are complementary to bDNA amplifier sequences, bind to the bDNA molecule by hybridization. The bDNA signal is the chemiluminescent product of the AP reaction See, e.g., Tsongalis, Microbiol. Inf. Dis. 126:448-453, 2006; U.S. Pat. No. 7,033,758.

[0129] In further examples, the signal amplification method utilizes polymerized antibodies. In some examples, the labeled probe is detected by using a primary antibody to the label (such as an anti-DIG or anti-DNP antibody). The primary antibody is detected by a polymerized secondary antibody (such as a polymerized HRP-conjugated secondary antibody or an AP-conjugated secondary antibody). The enzymatic reaction of AP or HRP leads to the formation of strong signals that can be visualized.

[0130] It will be appreciated by those of skill in the art that by appropriately selecting labeled probe-specific binding agent pairs, multiplex detection schemes can be produced to facilitate detection of multiple target nucleic acids (e.g., genomic target nucleic acids) in a single assay (e.g., on a single cell or tissue sample or on more than one cell or tissue sample). For example, a first probe that corresponds to a first target nucleic acid can be labeled with a first hapten, such as biotin, while a second probe that corresponds to a second target nucleic acid can be labeled with a second hapten, such as DNP. Following exposure of the sample to the probes, the bound probes can be detected by contacting the sample with a first specific binding agent (in this case avidin labeled with a first fluorophore, for example, a first spectrally distinct quantum dot, e.g., that emits at 585 nm) and a second specific binding agent (in this case an anti-DNP antibody, or antibody fragment, labeled with a second fluorophore (for example, a second spectrally distinct quantum dot, e.g., that emits at 705 nm). Additional probes/binding agent pairs can be added to the multiplex detection scheme using other spectrally distinct fluorophores. Numerous variations of direct, and indirect (one step, two step or more) can be envisioned, all of which are suitable in the context of the disclosed probes and assays.

[0131] Additional details regarding certain detection methods, e.g., as utilized in CISH and SISH procedures, can be found in Bourne, The Handbook of Immunoperoxidase Staining Methods, published by Dako Corporation, Santa Barbara, Calif.

[0132] Difficulties frequently encountered in ISH testing may result from the manner in which the tissues are typically preserved. The mainstay of the diagnostic pathology laboratory has been for many decades the formalin-fixed, paraffin-embedded block of tissue, sectioned and mounted upon glass slides. Fixation in such a preservative causes cross-linking of macromolecules, both amino acids and nucleic acids. These cross-linked components must be removed to allow access of the probe to the target nucleic acid and to allow the antibody to recognize the corresponding antigen. “Unmasking” the antigen and/or nucleic acid is typically accomplished manually with multiple pretreatment, proteolytic digestion, and wash steps. Prior to or staining, complete removal of the paraffin is also required so that it does not interfere with antibody or probe binding. Deparaffinization may be achieved by the use of multiple (e.g., two or three) successive clearing reagents that are paraffin solvents (e.g., xylene, xylene substitutes, or toluene).

[0133] In some embodiments, preparing the sample includes the step of cell conditioning. Cell conditioning is discussed in greater detail in U.S. Pat. No. 6,855,552, Towne, et al. “Automated immunohistochemical and in situ hybridization assay formulations”, the subject matter of which is expressly incorporated by reference. In illustrative cell conditioning steps, a cell conditioning reagent is applied and the sample is contacted at the appropriate temperature for an appropriate duration of time so that the antigens and/or nucleic acid targets are sufficiently expressed for detection. One aspect of the present disclosure is that the automated instrument can automatically adjust the cell conditioning duration and/or temperature in response to the user inputs. Cell conditioning may further include applying a protease reagent. Illustratively, a protease treatment may involve the step of contacting a protease solution to a biological sample. The protease treatment, as with cell conditioning, is intended to increase the expression of target antigens and/or nucleic acids.

[0134] Cell conditioning reagents such as ethylenediaminetetraacetic acid (EDTA) for nucleic acid targets (ISH) may be used. The contacting may be done at a temperature of about 95° C. for between about 2 and about 90 minutes. A partial list of possible reagents appears in Analytical Morphology, Gu, ed., Eaton Publishing Co. (1997) at pp. 1-40. Sodium dodecyl sulfate (SDS) and/or ethylene glycol may be included in the conditioning solution. Furthermore, metal ions or other materials may be added to these reagents to increase effectiveness of the cell conditioning. Exemplary cell conditioning solutions are available from Ventana Medical Systems, Inc., Tucson, Ariz. (Cell Conditioning 1 (CC1) catalog #: 950-124; Cell Conditioning 2 (CC2) catalog #: 950-123; SSC (10×) catalog #: 950-110; ULTRA Cell Conditioning (ULTRA CC1) catalog #: 950-224; ULTRA Cell Conditioning (ULTRA CC2) catalog #: 950-223, Protease 1 catalog #: 760-2018; Protease 2 catalog #: 760-2019; Protease 3 catalog #: 760-2020). In some embodiments, applying the in situ hybridization binding reagent occurs subsequent to applying the cell conditioning reagent and prior to applying the chromogenic reagent.

[0135] In illustrative embodiments, the method includes applying a rinsing reagent. Between various steps described herein and as part of the system described herein, rinse steps may be added to remove unreacted residual reagents from the prior step. Rinse steps may further include incubations, which include maintaining a rinsing reagent on the sample for a pre-determined time at a pre-determined temperature with or without mixing. The conditions appropriate for the rinsing steps may be distinct between the various steps. Exemplary rinsing reagents are available from Ventana Medical Systems, Inc., Tucson, Ariz. (Reaction Buffer (10×) catalog #: 950-300; Special Stains Wash (10×) catalog #: 860-015).

[0136] Exemplary automated systems available through Ventana Medical Systems, Inc., Tucson, Ariz. include SYMPHONY® Staining System, catalog #: 900-SYM3, VENTANA® BenchMark Automated Slide Preparation Systems, catalog #s: N750-BMKXT-FS, N750-BMKU-FS, VENTANA, and VENTANA® BenchMark Special Stains automated slide stainer. These systems employ a microprocessor controlled system including a revolving carousel supporting radially positioned slides. A stepper motor rotates the carousel placing each slide under one of a series of reagent dispensers positioned above the slides. Bar codes on the slides and reagent dispensers permits the computer controlled positioning of the dispensers and slides so that different reagent treatments can be performed for each of the various tissue samples by appropriate programming of the computer.

[0137] While EXAMPLE 1 below describes a single-stranded oligonucleotide-based PIK3CA/CHR3 dual ISH assay, it is understood that those of ordinary skill in the art could apply the discoveries disclosed herein to other gene/centromere combination of interest.

[0138] In some embodiments, the disclosed systems (e.g., probes) can be used in methods of determining the copy number of a target nucleic acid (such as PIK3CA) in a biological sample (such as a tissue sample). Methods of determining the copy number of a gene or chromosomal region are well known to those of skill in the art. In some examples, the methods include in situ hybridization (such as fluorescent, chromogenic, or silver in situ hybridization), comparative genomic hybridization, or polymerase chain reaction (such as real-time quantitative PCR). In some examples, methods of determining gene copy number include counting the number of ISH signals (such as fluorescent, colored, or silver spots) for the target nucleic acid in one or more individual cells. The methods may also include counting the number of ISH signals (such as fluorescent, colored, or silver spots) for a reference (such as a chromosome-specific probe) in the cells. In particular examples, the number of copies of the gene (or chromosome) may be estimated by the person (or computer, in the case of an automated method) scoring the slide. In some examples, an increased copy number relative to a control (such as an increase of about 1.5-fold, 2-fold, 3-fold, 5-fold, 10-fold, 20-fold, or more relative to a control sample or reference value) indicates an increase in the target nucleic acid copy number.

[0139] In some examples, the method includes counting the number of copies per cell or nucleus of a reference, such as a chromosomal locus known not to be abnormal, for example a centromere. In some examples, the reference is on the same chromosome as the gene of interest. Exemplary reference chromosomes that can be used for particular human genes of interest are provided in Table 5. In particular examples, the reference locus is detected by using a centromere-specific probe. Such probes are known in the art and are commercially available, for example, Vysis CEP probes (Abbott Molecular, Des Plaines, Ill.) and SPOTLIGHT centromeric probes (Invitrogen, Carlsbad, Calif.). In some examples, a ratio of target nucleic acid copy number to reference copy number greater than about two (such as greater than about 2, 3, 4, 5, 10, 20, or more) indicates an increase in the target nucleic acid copy number.

TABLE 5
EXEMPLARY REFERENCE CHROMOSOMES FOR PARTICULAR
TARGET NUCLEIC ACIDS

| Target Nucleic Acid | Reference Chromosome |
|---|---|
| PTEN | 10 |
| PIK3CA | 3 |
| TOP2A | 17 |
| MET | 7 |
| MDM2 | 12 |

### VI. METHODS OF SCORING

[0140] The present invention also features methods of scoring gene copy number of a target region and optionally comparing it to the copy number of a control region. For additional methods of scoring, which may be used with the methods described herein, reference is made to U.S. Publ. Appl. No. 2012/0141472, which is hereby incorporated by reference for disclosure related to scoring ISH.

[0141] In some examples, an increased gene copy number includes the gene copy number per nucleus (such as average gene copy number per nucleus) in the sample of greater than about two copies of the gene per nucleus (such as greater than 2, 3, 4, 5, 10, or 20 copies). In other examples, an increased gene copy number includes a ratio of gene copy number to its corresponding chromosome copy number (such as an average gene:chromosome ratio) in the sample of greater than about 2 (such as a ratio of greater than 2, 3, 4, 5, 10, or 20). In further examples, an increased gene copy number includes an increase in gene copy number relative to a control (such as an increase of about 1.5-fold, about 2-fold, about 3-fold, about 5-fold, about 10-fold, about 20-fold, or more). Therefore, in some examples, the method includes comparing the gene copy number in the sample from the subject to the gene copy number in a control or a reference value or range of values expected for the gene copy number in an appropriate normal tissue.

[0142] Also disclosed herein is a method of scoring (for example, enumerating) copy number of a gene in a sample from a subject, wherein the sample is stained by ISH (such as FISH, SISH, CISH, or a combination of two or more thereof) for the gene of interest and wherein individual copies of the gene are distinguishable in cells in the sample. In particular examples, the sample is a biological sample from a subject, such as a tumor sample (for example, a tumor biopsy). Methods of determining gene copy number by ISH are well known in the art.

[0143] In some embodiments, the method includes identifying individual cells in a sample with the highest number of signals per nucleus for the gene (such as the strongest signal in the sample), counting the number of signals for the gene in the identified cells, and determining an average number of signals per cell, thereby scoring the gene copy number in the sample. In additional embodiments, the method further includes counting the number of signals for a reference (such as a chromosomal locus known not to be abnormal, for example, centromeric DNA) and determining an average ratio of the number of signals for the gene to the number of signals for the reference per cell.

[0144] The scoring method may include identifying individual cells in the sample (such as a tissue section or tumor core) having the highest number of signals (such as the highest number of spots per cell or the brightest intensity of staining) for the gene of interest in the cells in the sample. Thus, the disclosed method may not determine gene copy number in a random sampling of cells in the sample. Rather, the method may include specifically counting gene copy number in those cells that have the highest gene copy number in the sample. In some examples, identifying the individual cells having the highest number of signals for the gene includes examining a sample stained by ISH for the gene under low power microscopy (such as about 20><magnification). Cells with the strongest signal (for example, highest amplification signal under higher power) are identified for counting by eye or by an automated imaging system. In some examples, such as when the sample is a tissue section, the sample is examined (for example, visually scanned) to identify a region that has a concentration of tumor cells that has amplification of the gene. Gene copy number in the cells with highest amplification in the selected region is then counted. In other examples, such as when the sample is a tumor core (such as a tumor microarray), most of the sample is visible in the field of view under low power magnification and the individual cells (such as tumor cells) with the strongest signal (for example, highest amplification signal under high power) are separately identified for counting. In particular examples, the cells chosen for counting the gene copy number may be non-consecutive cells, such as cells that are not adjacent to or in contact with one another. In other examples, at least some of the cells chosen for counting the gene copy number may be consecutive cells, such as cells that are adjacent to or in contact with one another.

[0145] The disclosed methods may include counting the number of ISH signals (such as fluorescent, colored, or silver spots) for the gene in the identified cells. The methods may also include counting the number of ISH signals (such as fluorescent, colored or silver spots) for a reference (such as a chromosome-specific probe) in the identified cells. In some examples, the number of spots per cells is distinguishable in the identified cells and the number of spots are counted (or enumerated) and recorded. In other examples, one or more of the identified cells may include a cluster, which is the presence of multiple overlapping signals in a nucleus that cannot be counted (or enumerated). In particular examples, the number of copies of the gene (or chromosome) may be estimated by the person (or computer, in the case of an automated method) scoring the slide. For example, one of skill in the art of pathology may estimate that a cluster contains a particular number of copies of a gene (such as 10, 20, or more copies) based on experience in enumerating gene copy number in a sample. In other examples, the presence of a cluster may be noted as a cluster, without estimating the number of copies present in the cluster.

[0146] The number of cells identified for counting is a sufficient number of cells that provides for detecting a change (such as an increase or decrease) in gene copy number. In some examples, the number of cells identified for counting is at least about 20, for example, at least 25, 30, 40, 50, 75, 100, 200, 500, 1000 cells, or more. In a particular example, about 50 cells are counted. In other examples, every cell in the sample or every cell in a microscope field of vision, or in a number of microscope fields (such as at least 2 microscope fields, at least 3, at least 4, at least 5, at least 6 microscope fields, and the like) which contains 3 or more copies of the gene of interest (such as 3, 4, 5, 6, 7, 8, 9, 10, 15, 20, or more) is counted.

[0147] Methods may feature obtaining a sample having undergone ISH according to methods disclosed herein. An area of neoplastic nuclei with the most copy numbers is identified and the enumerable signals for the chromosome/target are counted in 50-100 neoplastic nuclei and either 50 adjacent mesenchymal nuclei or 50 adjacent normal epithelial nuclei.

[0148] Scoring criteria may be as follows: no staining or <1 dot/10 cells is scored as 0; 1-3 dots/cell is scored as 1; 4-9 dots/cell, none or very few dot clusters is scored as 2; 10-15 dots/cell and <10% dots are in clusters is scored as 3; and >15 dots/cell and >10% dots are in clusters is scored as 4.

[0149] In some embodiments, the average number of target signals (e.g., PIK3CA) per nuclei is calculated. In some embodiments, the average number of chromosome (e.g., CHR3) copies per nuclei is calculated. In some embodiments, the target signal to chromosome signal ratio is calculated.

[0150] The disclosure is further illustrated by the following non-limiting Examples.

### EXAMPLES

### Example 1—Automated Bright-Field PIK3CA Copy Number Enumeration with Oligo Dual In Situ Hybridization and its Correlation with Overexpression of Phosphatidylinositol 3 Kinase on Human Lung Tumors

[0151] This example describes the use of CHR3 probes and PIK3CA probes for ISH assays. The example also describes the use of said probes for copy number enumeration. One skilled in the art will appreciate that methods that deviate from these specific methods can also be used to successfully detect a target nucleic acid and/or chromosome.

### Materials and Methods

### Specimens

[0152] Individual lung tissue samples obtained from a tissue specimen archive maintained at Ventana Medical Systems, Inc. (Tucson, Ariz.) were used for developing and optimizing PIK3CA dual ISH (DISH), mRNA ISH, and p110α IHC assays. These samples were redundant clinical specimens that had been de-identified and unlinked from patient information. A tissue microarray slide containing 102 lung tissues was obtained from Pantomics Inc. (Richmond, Calif., USA). Paraffin sections (4 μm) containing tissue cores of formalin-fixed, paraffin-embedded breast tissue were mounted on Superfrost® Plus glass slides.

### PIK3CA and Chromosome 3 Oligo Probes

[0153] The single-stranded oligonucleotide PIK3CA probe (PIK3CA oligo probe) is a DNP-labeled, repeat-free genomic probe that specifically targets the PIK3CA gene region. The PIK3CA oligo probe spans 759,736 nucleotides (nt) (178,640,071-179,399,807) of genomic DNA from human Chromosome 3, encompassing the PIK3CA target region (UCSC Genome Browser on GRCh37/hg19 human genome Assembly) (FIG. 1). A bioinformatic search was used to identify PIK3CA specific nucleic acid sequences around the PIK3CA target region. The selected genomic target nucleic acid sequence was separated into consecutive non-overlapping 80 nt segments. One thousand two hundred and twelve (1212) ˜80mer oligonucleotides each carrying 5 DNP haptens were synthesized. The oligonucleotides were purified and verified with Mass Spec and gel electrophoresis. The single-stranded oligonucleotide Chr3 probe (Chr3 oligo probe) is a pool of 18 oligonucleotides with a length as specified in Table 4. Each oligonucleotide was labeled with 2 DIG haptens; the oligonucleotides were PAGE purified and their molecular weights were verified by mass spectrometer. The PIK3CA oligo probe (5.0 ug/ml) and the Chr3 oligo probe (0.75 ug/ml) were combined in a formamide-containing buffer without human blocking DNA.

### Automated Bright-Field PIK3CA/CHR3 Oligo Dual ISH for Interphase Slides

[0154] The BenchMark ULTRA automated slide processing system (Ventana Medical Systems, Inc., Tucson, Ariz., USA) was used for designing and evaluating the performance of the single-stranded oligonucleotide PIK3CA and CHR3 dual ISH assays (PIK3CA/CHR3 Oligo DISH) for PIK3CA and CHR3 DNA targets. The ultraView SISH and ultraView Alkaline Phosphatase Red ISH detection kits (Ventana) were used for silver (PIK3CA) and red (CHR3) detection. The slides were deparaffinized at 69° C., followed by incubation with pH 6 citrate buffer at 82° C. and by digestion with ISH Protease 3 for 20 minutes. The probe mixture was then deposited onto the slide so as to contact the sample. The probe(s) were heated to 80° C. for 8 minutes to ensure the probes were denatured. Subsequently, conditions suitable for hybridizing the probes were maintained for 1 hour (e.g. temperature was lowered to 44° C. and maintained). The unbound probes were washed from the sample using 3 stringency washes (pH 6.0 citrate buffer at 72° C.). The presence of the probes on the sample was then detected by contacting the sample with a horseradish peroxidase-labeled rabbit anti-DNP antibody. Following a rinsing step to remove the unbound antibody-enzyme conjugate, the ultraView SISH reagent was contacted with the sample to cause silver metal precipitate to form. The specific hybridization of the DNP-linked PIK3CA probe to its target was detected by visualizing the insoluble precipitate of silver chromogen. The ultraView Alakaline Phosphatase reagents were then contacted with the sample according to its normal usage, first contacting the sample with an alkaline phosphatase (AP)-labeled mouse anti-DIG antibody, followed by rinsing and contacting the sample with the Fast Red chromogen system. The Chromosome 3 probe was detected by visualizing the soluble precipitate of the AP-based Fast Red chromogenic system. The slides were counterstained by contacting the samples with hematoxylin for 4 minutes and post-counterstained with bluing reagent for 4 minutes so that the morphology of the tissue could be better visualized.

### Automated Bright-Field PIK3CA/CHR3 Oligo DISH Chromosome Metaphase Spread Staining:

[0155] Metaphase chromosomes (CGH Metaphase Target Slides, Abbott Molecular) were UV cross-linked on Stratalinker 2400 (Stratagene Model # C00518) at energy level 200 mJ. They were then treated with 1% trypsin (Sigma cat#T1426) at room temperature for 5 seconds. The slides were then processed for PIK3CA/CHR3 Oligo DISH staining under the same conditions as described above except that the steps for baking, deparaffin, cell conditioning and counterstaining were omitted. After ISH staining was completed on the instrument, slides were stained with 4% Giemsa (Gibco, cat#10092-03) diluted in Gurr buffer (Gibco, cat#10582-013) at room temperature for 5 min, and staining was visualized with a regular light microscope.

Bright-Field PIK3CA mRNA ISH

[0156] Homo sapiens phosphatidylinositol-4,5-bisphosphate 3-kinase, catalytic subunit alpha (PIK3CA), mRNA (GenBank accession number: NM_006218.2) was targeted with Hs-PIK3CA (Cat. No: 603041, Advanced Cell Diagnostics, (ACD), Hayward, Calif.). Thirty of double Z oligonucleotide probe pairs were designed to cover the region 420-3261 nt. The signal amplification system consists of the preamplifier, amplifier, and enzyme conjugated label probe, which assemble into a tree-like structure via sequential hybridization. To ensure specificity, only when both ZZ probes bind to the preamplifier binding site can the signal amplification occurs at the target site under given assay conditions. Hs-PPIB was used as positive control probe to target Peptidylprolyl Isomerase B (Cyclophilin B) (ACD Cat. 313901); and dapB was used as negative control probe to target bacteria B. subtilis gene dihydrodipicolinate reductase (ACD Cat. 310043). The RNA in situ hybridization was performed manually using RNAscope® 2.0 FFPE Reagent Kit (RNAscope® 2.0 HD Red Reagent Kit, ACD Cat. No 310036) according to the manufacturer's instructions. Briefly, FFPE tissue sections were pretreated with heat and protease prior to hybridization with the target oligo probes. Preamplifier, amplifier and AP-labeled oligos were then hybridized sequentially, followed by chromogenic precipitate development. Each sample was quality controlled for RNA integrity with the probe specific to PPIB RNA and for background with the probe specific to bacterial dapB RNA. Samples with >70% of cells stained with moderate and strong signals for PPIB were considered pass for RNA integrity. Specific RNA staining signal was identified as red, punctuate dots mainly in the cytoplasm. Samples were counterstained with Gill's Hematoxylin. Signals were granular and discrete red signals corresponding to individual PIK3CA mRNA targets. Stained slides were scored semi-quantitatively using conventional bright-field microscopy

Immunohistochemistry of p110α Protein

[0157] PI3Kinase p110α (C73F8) rabbit monoclonal antibody (Cell signaling Cat #4249) was diluted 1:50 in 50 mM Tris buffer (pH 7.7) with 1% BSA and 1% normal goat serum. Staining was done on automated BenchMark®Ultra stainers. Antigen recovery was conducted using heat retrieval and CC1 standard, a high pH Tris/borate/EDTA buffer (Ventana, Cat#950-224). The PI3Kinase p110α antibody was incubated at 37° C. for 8 min. The primary antibody was detected using OptiView DAB IHC detection kit (Ventana, Cat#760-700). Slides were counter-stained with hematoxylin II (Ventana, Cat#790-2208) for 8 min, followed by Bluing reagent (Ventana, Cat#760-2037) for 4 min.

### PIK3CA/CHR3 Oligo DISH Stain Scoring Criteria:

[0158] Three board-certified pathologists (W. C., J. J., and T. G.) that had no previous knowledge of the genetic, clinical and IHC results evaluated the DISH stained slides. The readers first identify an area of neoplastic nuclei with most copy numbers, then count PIK3CA and CHR3 signals in 50-100 neoplastic nuclei and 50 adjacent mesenchymal nuclei (or normal epithelial nuclei) if possible. If one area does not have enough neoplastic nuclei to count (e.g. focal amplification), pathologists may move to another area with most copy numbers.

Bright-Field PIK3CA mRNA ISH Stain Semi-Quantitative Scoring Criteria

[0159] Scoring performed at 20× magnification. The scoring system is as following: 0, no staining or <1 dot/10 cells; 1, 1-3 dots/cell; 2, 4-9 dots/cell, none or very few dot clusters; 3. 10-15 dots/cell and <10% dots are in clusters; 4, >15 dots/cell and >10% dots are in clusters. If <5% of cells score 1 and >95% of cells score 0, a score of 0 will be given. If 5-30% of cells score 1 and >70% of cells score 0, a score of 0.5 will be given. ACD's H-Score analysis was also performed to evaluate heterogeneity in PIK3CA expression. The RNA signal is binned into 5 groups (bin 0: 0 dots/cell, bin 1: 1-3 dots/cell, bin 2: 4-9 dots/cell, bin 3: 10-15 dots/cell, and bin 4: >15 dots/cell with >10% of dots in clusters). Each sample is evaluated for the percentage of cells in each bin. The H-Score is calculated by adding up the percentage of cells in each bin, with a weight assigned to each bin, according to the formula below. H-Scores are given on a scale of 0-400. H scores=0*(% of cells in bin 0)+1*(% of cells in bin 1)+2*(% of cells in bin 2)+3*(% of cells in bin 3)+4*(% of cells in bin 4)

p110α IHC Stain Scoring Criteria

[0160] By light microscopy, representative viable tissue sections were scored semiquantitatively for cytoplasmic staining. The dominant staining intensity in tumor cells was scored as: 0=negative;

[0161] 1=weak; 2=intermediate; 3=strong. The level of staining in adjacent mesenchymal cells was used as baseline references. Most p110α IHC stain stains were homogeneous with more than 30% of cells showing the dominant staining intensity.

### Results:

[0162] PIK3CA/CHR3 Oligo DISH Assay with 1 hr Hybridization and No Use of Human Blocking DNA: Specific, Robust, and Superior CHR3 Staining

[0163] Specificity of the PIK3CA/CHR3 Oligo DISH assay was first verified on chromosomal metaphase spreads slides without human blocking DNA. The PIK3CA oligo probe (black signal) and the CHR3 oligo probe (red signal) were localized to the same chromosome. No cross-hybridization of either the PIK3CA oligo probe or the CHR3 oligo probe to other chromosomes was observed (FIG. 2). The specificity of PIK3CA/CHR3 Oligo DISH assay was further assessed on 5 non-tumor lung tissues (3 normal lung and 2 tuberculosis, TB granuloma cases). The average PIK3CA copy number ranges 1.69 to 1.86 per nuclei, the average CHR3 copy number ranges 1.75 to 1.97 per nuclei, and the average PIK3CA/CHR3 ratio ranges 1.701 to 1.08 per nuclei (Table 6). Furthermore, PIK3CA/CHR3 Oligo DISH assay was tested on Calu 3 cell line xenograft which has been characterized PIK3CA amplification (Spoerke, O'Brien et al. 2012) (FIG. 3).

TABLE 6
PIK3CA AND CHROMOSOME 3 COPY NUMBERS IN NORMAL AND
BENIGN LUNG TISSUES

| | | | | | | Ave | Ave |
|---|---|---|---|---|---|---|---|
| | | Nuclei | PIK3CA | Chr3 | PIK3CA/CHR3 | PIK3CA | CHR3 |
| Cases | Type | Number | copies | copies | Ratio | copies | copies |
| Case 1 | Normal | 100 | 182 | 197 | 1.02 | 1.82 | 1.97 |
| Case 2 | Normal | 100 | 186 | 192 | 1.01 | 1.86 | 1.92 |
| Case 3 | Normal | 100 | 175 | 172 | 1.08 | 1.75 | 1.72 |
| Case 4 | Tuberculosis, | 100 | 173 | 176 | 1.05 | 1.73 | 1.76 |
| | TB granuloma | | | | | | |
| Case 5 | Tuberculosis, | 100 | 169 | 175 | 1.03 | 1.69 | 1.75 |
| | TB granuloma | | | | | | |

[0164] All the aforementioned staining was performed with 1 hr hybridization, a time course study was designed to test if 1 hr is sufficient to generate adequate staining results when comparing to the longer hybridization times (2, 3, 4, 5, and 6 hrs). All the time points including 1 hr generate PIK3CA and CHR3 staining intensity 2.5 and above (≧2 acceptable), and staining coverage 80% and above (≧50% acceptable), and less than 0.5 background (≦1 acceptable) (FIG. 4).

[0165] Most FISH studies targeted chromosome 3 centromere alpha satellite (D3Z1) sequence for CHR3 enumeration with plasmid pHS05 (EMBL accession number Z12006) (Alexandrov, Mitkevich et al. 1988, Alexandrov, Mashkova et al. 1993). These assays all require human blocking DNA to reduce background from cross-reactivity to other chromosome alpha satellite. We labeled plasmid pHS05 with DIG and compared its performance to that of the CHR3 Oligo Probe. First of all, in the absence of human blocking DNA, the plasmid pHS05 probe generated excessive number of red signals in the epithelial and stromal nuclei in a normal lung tissue (FIG. 5). Next, we bulked the plasmid pHS05 probe with human placenta blocking DNA (2 mg/ml) and stained with the CHR3 Oligo Probe pair-wise on the same lung specimens. Whereas the chromosome 3 signals stained with the plasmid pHS05 probe appeared to be specific (1-2 dots/nuclei), the signals often looked diffuse or smudge-like (FIGS. 6A&B). Moreover, in severe scenario, enumeration of discrete dots was a big challenge. In contrast, the CHR3 Oligo Probe usually generated discrete signals with regular size and shape (FIGS. 6C&D).

Scoring 50 Neoplastic Nuclei with Most Copy Numbers for the PIK3CA/CHR3 Oligo DISH Assay

[0166] Up to now, no scoring criterion is available for bright-field PIK3CA/CHR dual ISH assay on lung tissues. FISH studies usually counted ˜100 nuclei on average. The minimal number is 20 on 419 primary tumor samples (Jehan, Bavi et al. 2009) (Kiyose, Nagura et al. 2012) counted 30 to 50 nuclei, and Costa C. et al. (Costa, Espinet et al. 2009) counted 200 in 26 primary tumor samples. PIK3CA and CHR3 signals were enumerated on 100 nuclei on 5 non-neoplastic lung tissues, 15 SCC tissues, and 6 other lung tumor types. PIK3CA/CHR3 ratio from the highest scores of 50 nuclei was consistent with the scores from the entire 100 nuclei enumeration (FIG. 7). When sequentially selecting 50 nuclei, 25 out of 26 cases demonstrated consistent results (either ratio <2 as normal or >2 as amplified) except for one case. This case had a ratio >2 with 100 nuclei counts, but <2 with 50 nuclei that were sequentially selected (FIG. 7). These results prove 50 nuclei count is sufficient enough to generate consistent results as 100 nuclei; and also underscore the importance of counting neoplastic nuclei with most copy numbers (See MATERIALS AND METHODS “PIK3CA/CHR3 Oligo DISH Stain Scoring Criteria”). Counting 50 neoplastic nuclei with most copy numbers was therefore implemented for the rest of clinical specimen assessment.

### PIK3CA Gene Amplification Mainly Occurs in SCC (37%) by the PIK3CA/CHR3 Oligo DISH Assay

[0167] PIK3CA gene status was analyzed on a cohort of 102 lung tissue microarray specimens: 49 SCC, 26 adenocarcinomas, 11 bronchial carcinomas, 1 carcinoid, 1 clear cell carcinomas, 3 normal, 1 papillary adenocarcinoma, 3 small cell lung carcinomas (SCLC), 2 tuberculosis, TB granulomas, and 5 undifferentiated carcinomas. 100% 1st pass rate was achieved on the 102 tissues, in which all the staining is interpretable for PIK3CA and CHR3 copy numbers. The PIK3CA/CHR3 ratio, average PIK3CA copy per nuclei, and average CHR3 copy per nuclei for each of the 102 lung tissues are illustrated in FIG. 8. In this cohort, SCC stands out with the highest incidence of elevated ratio and PIK3CA copy number from other tumor types. Only 1 adenocarcinoma with 4 copies of CHR3 and 1 SCC with 3.16 copies of CHR3 (FIG. 8), chromosome 3 polysomy seems unlikely the driving force for PIK3CA copy number gain.

[0168] A total of 21 lung tissues have PIK3CA/CHR3 ratio greater than 2 and/or average PIK3CA copy number greater than 4, among which 15 have both ratio >2 and copy number >4. These include 18 SCC (36.7% of SCC), 2 adenocarcinomas (7.7% of adenocarcinomas) and 1 SCLC (1 out of 3 SCLC) (FIG. 9). The PIK3CA/CHR3 ratio ranges from 2.03 to 5.77; the average PIK3 copy number per nuclei ranges from 3.00 to 9.96; the average CHR3 copy number per nuclei ranges from 1.38 to 4.02. Majority (18 out of 21) cases with PIK3CA copy number gain manifest multiple copies of discrete signals. Among the 21 cases, 20 demonstrate focal PIK3CA amplification in chromosome 3, only 1 case (C10, adenocarcinoma) has chromosome 3 polysomy.

[0169] Heterogeneity of PIK3CA gene copy gain in the 21 cases is presented in Table 7. In Case C12, C13, E6, F1, F2, F7, F8, and F10, almost all nuclei carry abnormally high copy number (4-9 and above per nuclei). In the remaining 13 cases, 12-80% of nuclei with normal (0-3) PIK3CA copies are mixed with abnormal (4-9 and above) nuclei. Regarding the copy number ranges of 4-9/nuclei, >10/nuclei, and >15/nuclei, 4-9 copies per nuclei represents the largest population of nuclei with PIK3CA gene amplification.

TABLE 7
HETEROGENEITY OF PIK3CA GENE COPY NUMBER
GAIN IN THE 21 LUNG TUMORS

| | Tumor | | % 0-3 | % 4-9 | % >10 | % >15 |
|---|---|---|---|---|---|---|
| Cores | type | #Nuclei | copies | copies | copies | copies |
| A11 | SCLC | 100 | 41 | 55 | 4 | |
| B12 | AdenoCA | 50 | 40 | 60 | | |
| C10 | AdenoCA | 50 | 38 | 60 | 2 | |
| C12 | SCC | 50 | | 68 | 28 | 4 |
| C13 | SCC | 50 | 2 | 76 | 14 | 8 |
| D4 | SCC | 100 | 33 | 62 | 5 | |
| D6 | SCC | 100 | 66 | 34 | | |
| E3 | SCC | 50 | 42 | 58 | | |
| E6 | SCC | 50 | 2 | 68 | 24 | 6 |
| E8 | SCC | 50 | 38 | 62 | | |
| E9 | SCC | 50 | 42 | 56 | 2 | |
| E10 | SCC | 50 | 22 | 56 | 20 | 2 |
| E13 | SCC | 50 | 12 | 74 | 14 | |
| F1 | SCC | 50 | 2 | 92 | 4 | |
| F2 | SCC | 50 | 0 | 50 | 42 | 8 |
| F6 | SCC | 50 | 10 | 76 | 14 | |
| F7 | SCC | 50 | 0 | 58 | 36 | 6 |
| F8 | SCC | 50 | 0 | 52 | 32 | 14 |
| F10 | SCC | 50 | 2 | 82 | 8 | 8 |
| F11 | SCC | 50 | 26 | 72 | 2 | |
| G8 | SCC | 50 | 80 | 20 | | |

[0170] With these 102 lung tissues, we also evaluated the CHR3 staining morphology with pHS05 plasmid in comparison to the CHR3 Oligo Probe. Thirty-seven (37) tissues were commented for inferior CHR3 staining quality (e.g. more red smudges, more red smears, increased red background), while only 2 cases stained with CHR3 Oligo Probe were commented for red signal variability.

PIK3CA mRNA Upregulation and Protein Overexpression Mainly Occurs in SCC by the PIK3CA mRNA ISH (45.3%) and p110 αIHC (75.5%)

[0171] The PIK3CA mRNA ISH staining achieved 87.3% (89/102) pass rate. Thirteen (13) tissues failed QC as <70% of cells with 2+ intensity for PPIB staining. Thirty (30) cases have mRNA H score 70 and above, among which 24 are SCC (24/49, 49.0% of SCC), 3 adenocarcinoma (3/26, 11.5%), 1 SCLC and 2 Undifferentiated. Non-tumor tissues have the lowest mRNA expression (3 normal and 2 TB) (FIG. 10C).

[0172] To optimize p110α IHC assay condition, human kidney was selected for its known IHC staining patterns (Uhlen M 2010), and Calu-3 cell line was chosen for its known PIK3CA gene amplification. Cells in glomeruli showed low-to-medium staining (<25% of cells with strong intensity), while cells in tubules had high staining (>75% of cells with strong intensity). Calu-3 had high immunoreactive staining. p110α IHC staining featured a predominantly cytoplasmic and in some cases an accentuated membranous staining (FIG. 10A). Focal and weak positive staining was found in some bronchiolar epithelial cells of normal lung tissue, and some of the lymphocytes and macrophages of tumor area, likely due to the role of PI3K in normal cell proliferation processes.

[0173] Ninety-nine (99) cases staining with p110α IHC demonstrated certain level of staining (0.5-3), 3 cases exhibited no staining in the entire tissue area. 65 cases exhibited p110α IHC intensity 2+ (34 cases) and 3+ (31 cases), among which 40 were SCC (40/49, 81.6% of SCC), 14 were adenocarcinomas (14/26, 53.8%), and 11 for other tumor types. Non-tumor tissues (3 normal and 2 TB) had the lowest p110α IHC intensity (0.5-1) (FIG. 10B).

17 Out of the 21 Amplified Cases (80.9%) have Both mRNA and Protein Overexpression (15 Cases) and Protein Overexpression (2 Cases)

[0174] For the 21 cases with PIK3CA copy number gain, fifteen cases (A11, C12, C13, D4, D6, E3, E6, E8, E10, E13, F2, F8, F10, F11, and G8) have both elevated mRNA level (H score >70) and protein overexpression (intensity 2 and 3). Two cases (C10 and F1) have p110alpha overexpression (intensity 2 and 3), but mRNA H scores are below 70 (22 and 44, respectively). Three cases (B12, E9 and F7) have no over-expression at both mRNA and protein levels. One case (F6) has a low H score (5) for mRNA, and the IHC staining is not interpretable. Taken together, ˜80% of the cases with PIK3CA copy number gain have overexpression at mRNA and/or protein levels. FIG. 10A showed the images of PIK3CA/CHR3 DISH, PIK3CA mRNA ISH and p100α IHC staining on a SCC (F3) with normal gene copy numbers (2.16, ratio 0.98), borderline mRNA expression (H score 75) and normal p110α expression (intensity 1, 80%). FIG. 10B showed the DISH, mRNA ISH and IHC images on a SCC (F2) with gene copy gain (9.04, ratio 3.55), increased mRNA (H score 160) and protein expression (intensity 3, 80%) (FIGS. 11A, 11B and 11C).

[0175] All publications, patent applications, patents, and other references mentioned herein are incorporated by reference in their entirety for all purposes. In case of conflict, the present specification, including explanations of terms, will control. The following other patents are herein incorporated by reference in their entirety: U.S. Pat. No. 7,807,356; U.S. Pat. No. 8,445,206.

[0176] While a number of exemplary aspects and embodiments have been discussed above, those of skill in the art will recognize certain modifications, permutations, additions and sub-combinations thereof as being present in the disclosure. It is therefore intended that the following appended claims and claims hereafter introduced are interpreted to include all such modifications, permutations, additions and sub-combinations as are within their true spirit and scope.

### Additional Exemplary Embodiments

[0177] The following additional embodiments are also specifically disclosed. This is not an exhaustive list.
[0178] 1. A system for in situ hybridization comprising:
   [0179] a control probe specific to a control region of chromosome 3, wherein the control probe is labeled with at least one first label, and wherein the control probe is configured to achieve least two enumerable signals per cell with a staining intensity of ≧2 and staining coverage of ≧50% of the number of total nuclei of a control sample within 3 hours of hybridization;
   [0180] wherein each enumerable signal has a generally round shape,
   [0181] wherein a round shape is a simple closed curve that fits within a first region, the first region lies on and outside of an inner circle and on and inside of a concentric outer circle, the inner circle having an inner radius (Rᵢₙ) and the outer circle having an outer radius (Rₒᵤₜ),
   [0182] wherein the simple close curve has a radius Rₛᵢₘₚₗₑ,
   [0183] wherein Rᵢₙ≦Rₛᵢₘₚₗₑ≦Rₒᵤₜ, and
   [0184] wherein, Rᵢₙ is ≧50% of Rₒᵤₜ,
   [0185] wherein a “simple closed curve” as used herein is a connected curve that does not cross itself and ends at the same point where it begins.
[0186] 2. The system of embodiment 1, wherein the control probe is a first plurality of single-stranded oligonucleotide probes, each probe comprising:
   [0187] a sequence selected from the group consisting of SEQ ID NOs: 1-18; or
   [0188] a sequence selected from the group consisting of a truncated version of SEQ ID NOs: 1-18, the truncated version being at least 40 contiguous basepairs (bp) of said SEQ ID NOs: 1-18; or
   [0189] a sequence selected from the group consisting of a sequence that has at least 70% sequence identity to one of SEQ ID NOs: 1-18.
[0190] 3. The system of embodiment 1, wherein the control probe is a first plurality of single-stranded oligonucleotide probes, each probe comprising:
   [0191] a sequence selected from the group consisting of SEQ ID NOs: 1-18; or
   [0192] a sequence selected from the group consisting of a truncated version of SEQ ID NOs: 1-18, the truncated version being at least 40 contiguous bp of said SEQ ID NOs:1-18; or
   [0193] a sequence selected from the group consisting of a sequence that has at least 80% sequence identity to one of SEQ ID NOs: 1-18.
[0194] 4. The system of embodiment 1, wherein the control probe is a first plurality of single-stranded oligonucleotide probes, each probe comprising:
   [0195] a sequence selected from the group consisting of SEQ ID NOs: 1-18; or
   [0196] a sequence selected from the group consisting of a truncated version of SEQ ID NOs: 1-18, the truncated version being at least 40 contiguous bp of said SEQ ID NOs:1-18; or
   [0197] a sequence selected from the group consisting of a sequence that has at least 90% sequence identity to one of SEQ ID NOs: 1-18.
[0198] 5. The system of any of embodiments 2 to 4, wherein the first plurality of single-stranded oligonucleotide probes is configured to hybridize uniquely and specifically to a portion of the control region human chromosome 3 so that other chromosomes or portions thereof are not evidently labeled.
[0199] 6. The system of any of embodiments 2 to 4, wherein the first plurality of single-stranded oligonucleotide probes is configured to hybridize uniquely and specifically to a portion the control region human chromosome 3 so that other chromosomes or portions thereof are not evidently labeled without the influence of blocking DNA.
[0200] 7. The system of any of embodiments 2 to 6, wherein the control probes each comprise between 50 to 100 nucleotides.
[0201] 8. The system of any of embodiments 2 to 4, wherein the first plurality of single-stranded oligonucleotide probes target between 2 and 18 distinct portions within the control region.
[0202] 9. The system of any of embodiments 2 to 4, wherein the first plurality of single-stranded oligonucleotide probes target between 4 and 18 distinct portions within the control region.
[0203] 10. The system of any of embodiments 2 to 4, wherein the first plurality of single-stranded oligonucleotide probes target between 6 and 18 distinct portions within the control region.
[0204] 11. The system of any of embodiments 2 to 4, wherein the first plurality of single-stranded oligonucleotide probes target between 8 and 18 distinct portions within the control region.
[0205] 12. The system of any of embodiments 2 to 4, wherein the first plurality of single-stranded oligonucleotide probes target between 10 and 18 distinct portions within the control region.
[0206] 13. The system of any of embodiments 2 to 12, wherein the control probes are each labeled with at least 2, at least 3, at least 4, or at least 5 first labels.
[0207] 14. The system of any of embodiments 1 to 13, wherein the first label comprises a digoxigenin (DIG).
[0208] 15. The system of any of embodiments 1 to 14, further comprising a target probe specific to a target region of human chromosome 3, wherein the target probe is labeled with at least one second label.
[0209] 16. The system of embodiment 10, wherein the target probe is specific to a target region near or around the PIK3CA gene locus.
[0210] 17. The system of embodiment 10, wherein the target probe is specific to a region between nucleotides 178,640,071 and 179,399,807 of human chromosome 3.
[0211] 18. The system of any of embodiments 1 to 17, further comprising an ISH staining instrument, the instrument is configured to contact the control probe to a tissue sample.
[0212] 19. A kit comprising a vessel containing a system according to any of embodiments 1 to 18 and instructions for use.
[0213] 20. A slide comprising a plurality of nuclei chromogenically stained for a chromosome, wherein more than 50% of the nuclei have enumerable signals for said chromosome, each enumerable signal being a generally round shape,
   [0214] wherein a round shape is a simple closed curve that fits within a first region, wherein the first region lies on and outside of an inner circle and on and inside of a concentric outer circle, the inner circle having an inner radius (Rᵢₙ) and the outer circle having an outer radius (Rₒᵤₜ),
   [0215] wherein the simple close curve has a radius Rₛᵢₘₚₗₑ,
   [0216] wherein Rᵢₙ≦Rₛᵢₘₚₗₑ≦Rₒᵤₜ, and
   [0217] wherein, Rᵢₙ is ≧50% of Rₒᵤₜ,
   [0218] wherein a “simple closed curve” as used herein is a connected curve that does not cross itself and ends at the same point where it begins.
[0219] 21. The slide of embodiment 20, wherein the chromosome is human chromosome 3.
[0220] 22. The slide of embodiment 20 or 21, wherein the slide is made using a system according to any of the claims 1 to 18.
[0221] 23. The slide of any of embodiments 20 to 22, wherein more than 60% of the nuclei have enumerable chromosome signals.
[0222] 24. The slide of any of embodiments 20 to 22, wherein more than 70% of the nuclei have enumerable chromosome signals.
[0223] 25. The slide of any of embodiments 20 to 24, wherein the inner radius is no less than 60% of the outer radius.
[0224] 26. The slide of any of embodiments 20 to 24, wherein the inner radius is no less than 75% of the outer radius.
[0225] 27. The slide of any of embodiments 20 to 24, wherein the inner radius is no less than 90% of the outer radius.
[0226] 28. The slide of any of embodiments 20 to 24, wherein the outer radius is between about 0.25 to 0.675 μm.
[0227] 29. The slide of any of embodiments 20 to 24, wherein the outer radius is between about 0.2 to 0.75 μm.
[0228] 30. The slide of any of embodiments 20 to 24, wherein the outer radius is between about 0.15 to 1 μm.
[0229] 31. The slide of any of embodiments 20 to 24, wherein the average outer radius of the enumerable signals is between about 0.2 to 0.75 μm.
[0230] 32. The slide of any of embodiments 20 to 24, wherein the average outer radius of the enumerable signals has a standard deviation of less than 0.5 μm.
[0231] 33. The slide of any of embodiments 20 to 24, wherein the average outer radius of the enumerable signals has a standard deviation of less than 0.25 μm.
[0232] 34. A slide comprising a plurality of nuclei stained for a chromosome,
   [0233] wherein a sum of the surface area covered by a staining signal is assigned a 100% value,
   [0234] wherein at least 50% of said sum of the surface area is derived from discrete enumerable, mono-sized round signals, each enumerable round signal being a generally round shape,
   [0235] wherein a round shape is a simple closed curve that fits within a first region, wherein the first region lies on and outside of an inner circle and on and inside of a concentric outer circle, the inner circle having an inner radius (Rᵢₙ) and the outer circle having an outer radius (Rₒᵤₜ),
   [0236] wherein the simple close curve has a radius Rₛᵢₘₚₗₑ,
   [0237] wherein Rᵢₙ≦Rₛᵢₘₚₗₑ≦Rₒᵤₜ, and
   [0238] wherein, Rᵢₙ is ≧50% of Rₒᵤₜ.
[0239] 35. The slide of embodiment 34, wherein the chromosome is human chromosome 3.
[0240] 36. The slide of embodiments 34 or 35, wherein the slide is made using a system according to any of the claims 1 to 18.
[0241] 37. The slide of any of embodiments 34 to 36, wherein more than 60% of said sum of the surface area is from discrete mono-sized round signals; wherein mono-sized round signals have a round shape, wherein a round shape is a simple closed curve that fits within a first region, wherein the first region lies on and outside an inner circle and on and inside a concentric outer circle, the inner circle having an inner radius (Rᵢₙ) and the outer circle having an outer radius (Rₒᵤₜ),
   [0242] wherein the simple close curve has a radius Rₛᵢₘₚₗₑ,
   [0243] wherein Rᵢₙ≦Rₛᵢₘₚₗₑ≦Rₒᵤₜ, and
   [0244] wherein, Rᵢₙ is ≧50% of Rₒᵤₜ.
[0245] 38. The slide of any of embodiments 34 to 38, wherein more than 70% of said sum of the surface area is from discrete mono-sized round signals; wherein mono-sized round signals have a round shape, wherein a round shape is a simple closed curve that fits within a first region, wherein the first region lies on and outside an inner circle and on and inside a concentric outer circle, the inner circle having an inner radius (Rᵢₙ) and the outer circle having an outer radius (Rₒᵤₜ),
   [0246] wherein the simple close curve has a radius Rₛᵢₘₚₗₑ,
   [0247] wherein Rᵢₙ≦Rₛᵢₘₚₗₑ≦Rₒᵤₜ, and
   [0248] wherein, Rᵢₙ is ≧50% of Rₒᵤₜ.
[0249] 39. The slide of any of embodiments 34 to 38, wherein the inner radius is no less than 60% of the outer radius.
[0250] 40. The slide of any of embodiments 34 to 38, wherein the inner radius is no less than 75% of the outer radius.
[0251] 41. The slide of any of embodiments 34 to 38, wherein the inner radius is no less than 90% of the outer radius.
[0252] 42. A method for in situ hybridization comprising:
   [0253] contacting a tissue sample with a control probe specific to a control region of a chromosome, wherein the control probe is a single-stranded oligonucleotide probe labeled with at least one first label, and wherein the control probe is configured to achieve at least two signals per cell with a staining intensity of ≧2 and staining coverage of ≧50% of the number of total nuclei of a control sample within 3 hours of hybridization;
   [0254] hybridizing the control probe to the control region under conditions for a period of time less than about 3 hours;
   [0255] rinsing the sample to remove unbound probe; and
   [0256] detecting the presence of the hybridized probe.
[0257] 43. The method of embodiment 42, wherein the method is for bright-field in situ hybridization.
[0258] 44. The method of embodiment 42 or 43, wherein the control probe is hybridized to the control region under conditions for a period of time less than about 2 hours.
[0259] 45. The method of embodiment 42 or 43, wherein the control probe is hybridized to the control region under conditions for a period of time less than about 1 hour.
[0260] 46. The method of any of embodiments 42 to 45, wherein the chromosome is human chromosome 3.
[0261] 47. The method of any of embodiments 42 to 46, further comprising contacting the tissue sample with a target probe specific to a control region of the chromosome, the target probe is a single-stranded oligonucleotide probe labeled with at least one second label.
[0262] 48. The method of embodiment 47, wherein the target probe is specific to a target region near or around the PIK3CA gene locus of chromosome 3.
[0263] 49. The method of embodiment 47, wherein the target probe is specific to a region between nucleotides 178,640,071 and 179,399,807 of human chromosome 3.
[0264] 50. The method of any of embodiments 42 to 49, further comprising applying chromogenic detection reagents that recognize the first label and amplify the signal associated with said first label.
[0265] 51. The method of any of embodiments 42 to 50, wherein the tissue sample is a formalin-fixed paraffin-embedded (FFPE) tissue sample.
[0266] 52. The method of any of embodiments 42 to 51, wherein the method is free from the use of blocking DNA.
[0267] 53. The method of any of embodiments 42 to 51, wherein an amount of blocking DNA is used.
[0268] 54. A method for in situ hybridization of a tissue sample, the method comprising contacting the tissue sample with a system according to any of claims 1 to 18.
[0269] 55. A method for bright-field chromogenic in situ hybridization without the use of blocking DNA, said method comprising:
   [0270] contacting a tissue sample with a control probe specific to a control region of a chromosome;
   [0271] hybridizing the control probe to the control region of said chromosome;
   [0272] rinsing the sample to remove unbound probe; and
   [0273] detecting the presence of the hybridized probe via a chromogenic reagent;
   [0274] wherein no blocking DNA is used in any of the above steps.
[0275] 56. A method for obtaining two bright-field chromogenic in situ hybridization signals per cell, said method comprising:
   [0276] contacting a tissue sample containing a plurality of cells with a control probe specific to a control region of a single chromosome, wherein the probe selected so as to not evidently bind non-specifically in the absence of blocking DNA;
   [0277] hybridizing the control probe to the control region of said chromosome;
   [0278] rinsing the sample to remove unbound probe; and
   [0279] detecting the presence of the hybridized probe via a chromogenic reagent so as to generate two bright-field chromogenic in situ hybridization signals per cell.
[0280] 57. The method of embodiment 55 or 56, wherein the control probe comprises a single-stranded oligonucleotide probe labeled with at least one first label.
[0281] 58. The method of any of embodiments 55 to 57, wherein the chromosome is human chromosome 3.
[0282] 59. A method for bright-field chromogenic in situ hybridization comprising:
   [0283] contacting a tissue sample with a control probe specific to a control region of a chromosome;
   [0284] hybridizing the control probe to the control region of said chromosome;
   [0285] rinsing the sample to remove unbound probe; and
   [0286] detecting the presence of the hybridized probe via a chromogenic reagent;
   [0287] wherein an amount of blocking DNA is used in one of the above steps, the amount of blocking DNA is sufficient to block out no more than 50% of the non-specific binding.
[0288] 60. The method of embodiment 59, wherein the control probe comprises a single stranded oligonucleotide probe labeled with at least one first label.
[0289] 61. The method of embodiment 59 or 60, wherein the chromosome is human chromosome 3.
[0290] 62. The method of any of embodiments 59 to 61, wherein the amount of blocking DNA is between about 1 pg/ml to 1 mg/ml.
[0291] 63. A method of in situ hybridization, the method comprising:
   [0292] contacting a tissue sample with a control probe specific to a control region of a chromosome, wherein the control probe is a single-stranded oligonucleotide probe labeled with at least one first label, and wherein the control probe is configured to achieve two signals per cell with a staining intensity of ≧2 and staining coverage of ≧50% of the number of total nuclei of a control sample within 3 hours of hybridization;
   [0293] hybridizing the control probe to the control region of said chromosome under conditions for a period of time less than 3 hours;
   [0294] rinsing the sample to remove unbound probe; and
   [0295] detecting the presence of the hybridized probe;
   [0296] wherein more than 50% of the nuclei of the tissue sample have enumerable signals for said chromosome, an enumerable signal being a generally round shape, wherein a round shape is a simple closed curve that fits within a first region, wherein the first region lies on and outside an inner circle and on and inside a concentric outer circle, the inner circle having an inner radius (Rᵢₙ) and the outer circle having an outer radius (Rₒᵤₜ),
   [0297] wherein the simple close curve has a radius Rₛᵢₘₚₗₑ,
   [0298] wherein Rᵢₙ≦Rₛᵢₘₚₗₑ≦Rₒᵤₜ, and
   [0299] wherein, Rᵢₙ is ≧50% of Rₒᵤₜ.
[0300] 64. The method of embodiment 63, wherein background signals (more than 2 signals) are not observed in >80% of cells of the tissue sample.
[0301] 65. The method of embodiment 63 or 64, wherein background signals have a staining intensity of 0 or 1.
[0302] 66. The method of any of embodiments 63 to 65, wherein the tissue sample is contacted with a system according to any of the claims 1 to 19.
[0303] 67. The method of any of embodiments 63 to 66, wherein more than 60% of the nuclei have enumerable chromosome signals.
[0304] 68. The method of any of embodiments 63 to 66, wherein more than 70% of the nuclei have enumerable chromosome signals.
[0305] 69. The method of any of embodiments 63 to 68, wherein the inner radius is no less than 60% of the outer radius.
[0306] 70. The method of any of embodiments 63 to 68, wherein the inner radius is no less than 75% of the outer radius.
[0307] 71. The method of any of embodiments 63 to 68, wherein the inner radius is no less than 90% of the outer radius.
[0308] 72. The method of any of embodiments 63 to 71, wherein the outer radius is between about 0.2 to 0.675 μm.
[0309] 73. The method of any of embodiments 63 to 71, wherein the outer radius is between about 0.2 to 0.75 μm.
[0310] 74. The method of any of embodiments 63 to 71, wherein the outer radius is between about 0.1 to 0.5 μm.
[0311] 75. The method of any of embodiments 63 to 71, wherein the average outer radius of the enumerable signals is between about 0.2 to 0.75 μm.
[0312] 76. The method of any of embodiments 63 to 71, wherein the average outer radius of the enumerable signals has a standard deviation of less than 0.5 μm.
[0313] 77. The method of any of embodiments 63 to 71, wherein the average outer radius of the enumerable signals has a standard deviation of less than 0.2 μm.
[0314] 78. The method of any of embodiments 63 to 77, wherein the chromosome is human chromosome 3.
[0315] 79. A method of scoring for a chromosome for PIK3CA gene copy amplification, said method comprising:
   [0316] obtaining a tissue sample having undergone ISH according to claims 42-78, wherein a control probe and target probe are used;
   [0317] identifying an area of neoplastic nuclei with most copy numbers; and
   [0318] counting enumerable signals for PIK3CA signal in 50-100 neoplastic nuclei and either 50 adjacent mesenchymal nuclei or 50 adjacent normal epithelial nuclei;
   [0319] wherein scoring criteria comprises: no staining or <1 dot/10 cells is scored as 0; 1-3 dots/cell is scored as 1; 4-9 dots/cell, none or very few dot clusters is scored as 2; 10-15 dots/cell and <10% dots are in clusters is scored as 3; and >15 dots/cell and >10% dots are in clusters is scored as 4.
[0320] 80. The method of embodiment 79 further comprising calculating the ratio of PIK3CA signal to control signal.
[0321] 81. The method of embodiment 79 further comprising calculating the average number of PIK3CA copies per nuclei.
[0322] 82. A control probe for use in a bright-field chromogenic in situ hybridization, wherein the control probe is specific to a control region of chromosome 3, the control probe is labeled with at least one first label, the control probe is selected so as to not evidently bind non-specifically in the absence of blocking DNA.

### REFERENCES

[0323] Yurov Y B, Mitkevich S P, Alexandrov I A: Application of cloned satellite DNA-sequences to molecular-cytogenetic analysis of constitutive heterochromatin heteromorphisms in man. Hum Genet 1987, 76: 157e164.
[0324] Woenckhaus J, Steger K, Sturm K, Münstedt K, Franke F E, Fenic I: Prognostic value of PIK3CA and phosphorylated AKT expression in ovarian cancer. Virchows Arch 2007, 450:387e395.
[0325] Agell L, Hernandez S, Salido M, de Muga S, Juanpere N, Arumí-Uria M, Menendez S, Lorenzo M, Lorente J A, Serrano S, Lloreta J: PI3K signaling pathway is activated by PIK3CA mRNA overexpression and copy gain in prostate tumors, but PIK3CA, BRAF, KRAS and AKT1 mutations are infrequent events. Mod Pathol 2011, 24:443e452.
[0326] Jang W, Yonescu R, Knutsen T, Brown T, Reppert T, Sirotkin K, Schuler G D, Ried T, Kirsch I R. Linking the human cytogenetic map with nucleotide sequence: the CCAP clone set. Cancer Genet Cytogenet 2006; 168(2): 89-97.
[0327] De Marco C, Rinaldo N, Bruni P, Malzoni C, Zullo F, Fabiani F, Losito S, Scrima M, Marino F Z, Franco R, Quintiero A, Agosti V, Viglietto G: Multiple genetic alterations within the PI3K pathway are responsible for AKT activation in patients with ovarian carcinoma. PLoS One 2013, 8:e55362.
[0328] Nakayama K, Nakayama N, Kurman R J, Cope L, Pohl G, Samuels Y, Velculescu V E, Wang T L, Shih I M: Sequence mutations and amplification of PIK3CA and AKT2 genes in purified ovarian serous neoplasms. Cancer Biol Ther 2006, 5:779e785.
[0329] Taneja K, Singer R H: Use of oligodeoxynucleotide probes for quantitative in situ hybridization to actin messenger-RNA. Anal Biochem 1987, 166:389e398.
[0330] Lewis M E, Sherman T G, Watson S J: In situ hybridization histochemistry with synthetic oligonucleotides: strategies and methods. Peptides 1985, 6(Suppl 2):75e87.
[0331] Strachan T., Read A P. Human molecular genetics 3. 1st ed. New York: Garland Science/Taylor & Francis Group, 1999.[Book]
[0332] Kourilsky P, Mercereau O, Gros D, Tremblay G. Biochimie. Hybridization of filters with competitor DNA in the liquid phase in a standard and a micro-assay. 1974; 56(9):1215-21.
[0333] An S F, Franklin D, Fleming K A. Generation of digoxigenin-labelled double-stranded and single-stranded probes using the polymerase chain reaction. Mol Cell Probes. 1992 June; 6(3): 193-200.
[0334] Hannon K, Johnstone E, Craft L S, Little S P, Smith C K, Heiman M L, Santerre R F. Synthesis of PCR-derived, single-stranded DNA probes suitable for in situ hybridization. Anal Biochem. 1993 Aug. 1; 212(2):421-7.
[0335] Cox K H, DeLeon D V, Angerer L M, Angerer R C. Detection of mrnas in sea urchin embryos by in situ hybridization using asymmetric RNA probes. Dev Biol. 1984 February; 101(2):485-502.
[0336] Alexandrov I A, Mashkova T D, Romanova L Y, Yurov Y B, Kisselev L L: Segment substitutions in alpha satellite DNA. Unusual structure of human chromosome 3-specific alpha satellite repeat unit. J Mol Biol 1993, 231:516e520.
[0337] Minna J D, Roth J A, Gazdar A F. Focus on lung cancer. Cancer Cell. 2002 February; 1(1):49-52.
[0338] Zochbauer-Muller S, Gazdar A F, Minna J D. Molecular pathogenesis of lung cancer. Annu Rev Physiol. 2002; 64:681-708.
[0339] Lam D C L, Clinical testing for molecular targets for personalized treatment in lung cancer. Respirology. 2013; 18(2): 233-237.
[0340] Villaruz L C, Burns T F, Ramfidis V S, Socinski M A. Personalizing therapy in advanced non-small cell lung cancer. Semin Respir Crit Care Med. 2013 December; 34(6):822-36.
[0341] Ji M, Guan H, Gao C, Shi B, and Hou P. Highly frequent promoter methylation and PIK3CA amplification in non-small cell lung cancer (NSCLC). BMC Cancer. 2011; 11: 147.
[0342] Lockwood W W, Wilson I M, Coe B P, Chari R, Pikor L A, Thu K L, Solis L M, Nunez M I, Behrens C, Yee J, English J, Murray N, Tsao M S, Minna J D, Gazdar A F, Wistuba I I, MacAulay C E, Lam S, Lam W L. Divergent genomic and epigenomic landscapes of lung cancer subtypes underscore the selection of different oncogenic pathways during tumor development. PLoS One. 2012; 7(5):e37775.
[0343] Kok K, Geering B, Vanhaesebroeck B: Regulation of phosphoinositide 3-kinase expression in health and disease. Trends Biochem Sci 2009, 34:115e127.
[0344] Massion P P, Kuo W L, Stokoe D, Olshen A B, Treseler P A, Chin K, Chen C, Polikoff D, Jain A N, Pinkel D, Albertson D G, Jablons D M, Gray J W: Genomic copy number analysis of non-small cell lung cancer using array comparative genomic hybridization: implications of the phosphatidylinositol 3-kinase pathway. Cancer Res 2002, 62: 3636e3640.
[0345] Okudela K, Suzuki M, Kageyama S, Bunai T, Nagura K, Igarashi H, Takamochi K, Suzuki K, Yamada T, Niwa H, Ohashi R, Ogawa H, Mori H, Kitamura H, Kaneko T, Tsuneyoshi T, Sugimura H: PIK3CA mutation and amplification in human lung cancer. Pathol Int 2007, 57: 664e671.
[0346] Yamamoto H, Shigematsu H, Nomura M, Lockwood W W, Sato M, Okumura N, Soh J, Suzuki M, Wistuba I I, Fong K M, Lee H, Toyooka S, Date H, Lam W L, Minna J D, Gazdar A F: PIK3CA mutations and copy number gains in human lung cancers. Cancer Res 2008, 68:6913e6921.
[0347] Spoerke J M, O'Brien C, Huw L, Koeppen H, Fridlyand J, Brachmann R K, Haverty P M, Pandita A, Mohan S, Sampath D, Friedman L S, Ross L, Hampton G M, Amler L C, Shames D S, Lackner M R: Phosphoinositide 3-kinase (PI3K) pathway alterations are associated with histologic subtypes and are predictive of sensitivity to PI3K inhibitors in lung cancer preclinical models. Clin Cancer Res 2012, 18:6771e6783.
[0348] Woenckhaus J, Steger K, Werner E, Fenic I, Gamerdinger U, Dreyer T, Stahl U: Genomic gain of PIK3CA and increased expression of p110alpha are associated with progression of dysplasia into invasive squamous cell carcinoma. J Pathol 2002, 198:335e342.
[0349] Wee S, Lengauer C, Wiederschain D: Class IA phosphoinositide 3-kinase isoforms and human tumorigenesis: implications for cancer drug discovery and development. Curr Opin Oncol 2008, 20:77e82.
[0350] Salphati L, Wong H, Belvin M, Bradford D, Edgar K A, Prior W W, Sampath D, and Wallin J J. Pharmacokinetic-Pharmacodynamic Modeling of Tumor Growth Inhibition and Biomarker Modulation by the Novel Phosphatidylinositol 3-Kinase Inhibitor GDC-0941. Drug Metabolism and Disposition. 2010; 38 (9):1436-1442.
[0351] Blumenthal G M, Orbach R C, Zineh I, Cortazar P, Justice R L, Pazdur R. Early targeted drug development: Pilot FDA review of PI3K inhibitor phase I studies using a knowledge management database. J Clin Oncol 29: 2011 (suppl; abstr 3060).
[0352] Salphati L, Pang J, Plise E G, Chou B, Halladay J S, Olivero A G, Rudewicz P J, Tian Q, Wong S, Zhang X. Preclinical pharmacokinetics of the novel PI3K inhibitor GDC-0941 and prediction of its pharmacokinetics and efficacy in human. Xenobiotica. 2011 December; 41(12):1088-99.
[0353] Angulo B, Suarez-Gauthier A, Lopez-Rios F, Medina P P, Conde E, Tang M, Soler G, Lopez-Encuentra A, Cigudosa J C, Sanchez-Cespedes M. Expression signatures in lung cancer reveal a profile for EGFR-mutant tumours and identify selective PIK3CA overexpression by gene amplification. J Pathol. 2008 February; 214(3):347-56.
[0354] Scrima M, De Marco C, Fabiani F, Franco R, Pirozzi G, Rocco G, Ravo M, Weisz A, Zoppoli P, Ceccarelli M, Botti G, Malanga D, Viglietto G. Signaling Networks Associated with AKT Activation in Non-Small Cell Lung Cancer (NSCLC): New Insights on the Role of Phosphatydil-Inositol-3 kinase. PLOS One. Feb. 17, 2012D01: 10.1371/journal.pone.0030427.
[0355] Shayesteh L, Lu Y, Kuo W L, Baldocchi R, Godfrey T, Collins C, Pinkel D, Powell B, Mills G B, Gray J W: PIK3CA is implicated as an oncogene in ovarian cancer. Nat Genet 1999, 21:99e102.
[0356] Psyrri A, Papageorgiou S, Liakata E, Scorilas A, Rontogianni D, Kontos C K, Argyriou P, Pectasides D, Harhalakis N, Pappa V, Kolialexi A, Economopoulou C, Kontsioti F, Maratou E, Dimitriadis G, Economopoulou P, Economopoulos T. Phosphatidylinositol 3′-kinase catalytic subunit alpha gene amplification contributes to the pathogenesis of mantle cell lymphoma. Clin Cancer Res. 2009 Sep. 15; 15(18):5724-32.
[0357] Jehan Z, Bavi P, Sultana M, Abubaker J, Bu R, Hussain A, Alsbeih G, Al-Sanea N, Abduljabbar A, Ashari L H, Alhomoud S, Al-Dayel F, Uddin S, Al-Kuraya K S. Frequent PIK3CA gene amplification and its clinical significance in colorectal cancer. J Pathol. 2009 November; 219(3):337-46.
[0358] Kiyose S, Nagura K, Tao H, Igarashi H, Yamada H, Goto M, Maeda M, Kurabe N, Suzuki M, Tsuboi M, Kahyo T, Shinmura K, Hattori N, Sugimura H. Detection of kinase amplifications in gastric cancer archives using fluorescence in situ hybridization. Pathol Int. 2012 July; 62(7):477-84.
[0359] Costa C, Espinet B, Molina M A, Salgado R, Salido M, Baró T, Fusté P, Mancebo G, Carreras R, Sole F, Serrano S, Alameda F. Analysis of gene status in cervical dysplastic lesions and squamous cell carcinoma using tissue microarrays. Histol Histopathol. 2009 July; 24(7):821-9.

The application's sequence listing, which the Patent Office published only in electronic form, follows.

SEQUENCE LISTING (1231 sequences)

SEQ ID NO: 1 - DNA, 80 bp, Artificial Sequence
  Synthetic Probe
tctgtggaatttgcaaggggagatttcaagcactttgaggccattggtggaaaaggaaatatcttcgtatgaaaactaga

SEQ ID NO: 2 - DNA, 80 bp, Artificial Sequence
  Synthetic Probe
cagaatcattctcaggaactactttgtgatatgtgcattcaactcccagagtttaacctttcttttcatagatgagtttg

SEQ ID NO: 3 - DNA, 80 bp, Artificial Sequence
  Synthetic Probe
aatgctagacagaagaattctcagtaacttcttttgggatgtatgtattcaaatcagagagttgaaccttcctttagaca

SEQ ID NO: 4 - DNA, 80 bp, Artificial Sequence
  Synthetic Probe
gagcggattggaaacactctttttgtggaatttgcaagtggaaaattctagcagtatgaggccaatggtacaaaaggaaa

SEQ ID NO: 5 - DNA, 80 bp, Artificial Sequence
  Synthetic Probe
tatcttcgtataaaaactagacagtatcattctcagaaactgctttgtgatgtgtgtattaaactcacagagttgaacat

SEQ ID NO: 6 - DNA, 80 bp, Artificial Sequence
  Synthetic Probe
ttctttgcatagagcagtttggaaagacttagtttgtgcagtgtgcaagtggatatttggaactctttgaggccttcgtt

SEQ ID NO: 7 - DNA, 80 bp, Artificial Sequence
  Synthetic Probe
atgtgtgcattcggctcacagagttgaaccttactttggaaagagcagttttctaacactctttttgtaaaagttccaag

SEQ ID NO: 8 - DNA, 80 bp, Artificial Sequence
  Synthetic Probe
tgaatactttgagtgctttgaagcctacggttgacaacgaaatatcttcctgtaaaaactacaaagaatcattcgcagaa

SEQ ID NO: 9 - DNA, 80 bp, Artificial Sequence
  Synthetic Probe
accacgttgtgatctctgcattcaactcacagagttcaacctttcttcctatagagcagttatgaaacagtctctttgta

SEQ ID NO: 10 - DNA, 80 bp, Artificial Sequence
  Synthetic Probe
gaatttgcaagggtgtatttagagggcattgaagcctacggtagaaaaggaaatatcttaccataaaatctagtcagaag

SEQ ID NO: 11 - DNA, 80 bp, Artificial Sequence
  Synthetic Probe
cattctcagcaactgagttgtgatgtttgcattcaactcacagagttcaacattccttttaatggagcggttttgaaaca

SEQ ID NO: 12 - DNA, 80 bp, Artificial Sequence
  Synthetic Probe
attggaaacactctttttgtggaattttcaggtggaggtatcaagcgctttgaggccaatgatagaaaaggaaatacctt

SEQ ID NO: 13 - DNA, 80 bp, Artificial Sequence
  Synthetic Probe
cgtataataattagacggaatcattctcagaaaccgctttgcaatgtgtgcgttcaactcacagtgtttaacctttcttt

SEQ ID NO: 14 - DNA, 80 bp, Artificial Sequence
  Synthetic Probe
tcatacaagttgtttcgaaacactctttttgcagaatctgcaagtggatatttggacctctttgaagtcttcgttggaaa

SEQ ID NO: 15 - DNA, 80 bp, Artificial Sequence
  Synthetic Probe
gccttcgtagtaaacgggatttcttcgtgtaatgatagacaatagaattctcagtgaatttttttctgtgtgtgtgtatt

SEQ ID NO: 16 - DNA, 80 bp, Artificial Sequence
  Synthetic Probe
ttgaagtgaatggtaggaaaggaaataccttcgtataaaaactagacggagtcattctcagaaactactttgtgatgttt

SEQ ID NO: 17 - DNA, 80 bp, Artificial Sequence
  Synthetic Probe
atttgcaagtggagaattctagcgctttgacgccaatggtagaaaggaaatatcttcgtataaaaactagacagtatcat

SEQ ID NO: 18 - DNA, 80 bp, Artificial Sequence
  Synthetic Probe
cggttggaaacactttttgtggaattttcagggggagacttcaagcgctttgaagtgaatggtaggaaaggaaatacctt

SEQ ID NO: 19 - DNA, 87 bp, Artificial Sequence
  Synthetic Probe
  modified_base (2)..(2): DNP phosphoramidite base
  misc_feature (2)..(2): n is a, c, g, or t
  modified_base (23)..(23): DNP phosphoramidite base
  misc_feature (23)..(23): n is a, c, g, or t
  modified_base (44)..(44): DNP phosphoramidite base
  misc_feature (44)..(44): n is a, c, g, or t
  modified_base (65)..(65): DNP phosphoramidite base
  misc_feature (65)..(65): n is a, c, g, or t
  modified_base (86)..(86): DNP phosphoramidite base
  misc_feature (86)..(86): n is a, c, g, or t
tnaagacaccacaacagaactgngtatcatgagggagtccacanggttggcttggagcaagaggnagaagtggatgaaatgcacant

SEQ ID NO: 20 - DNA, 87 bp, Artificial Sequence
  Synthetic Probe
  modified_base (2)..(2): DNP phosphoramidite base
  misc_feature (2)..(2): n is a, c, g, or t
  modified_base (23)..(23): DNP phosphoramidite base
  misc_feature (23)..(23): n is a, c, g, or t
  modified_base (44)..(44): DNP phosphoramidite base
  misc_feature (44)..(44): n is a, c, g, or t
  modified_base (65)..(65): DNP phosphoramidite base
  misc_feature (65)..(65): n is a, c, g, or t
  modified_base (86)..(86): DNP phosphoramidite base
  misc_feature (86)..(86): n is a, c, g, or t
tnttactgttttaggaatgcttnacatcagactctgacattcanaatgtgacggtagatagatcntgacagagagaggagatatant

SEQ ID NO: 21 - DNA, 87 bp, Artificial Sequence
  Synthetic Probe
  modified_base (2)..(2): DNP phosphoramidite base
  misc_feature (2)..(2): n is a, c, g, or t
  modified_base (23)..(23): DNP phosphoramidite base
  misc_feature (23)..(23): n is a, c, g, or t
  modified_base (44)..(44): DNP phosphoramidite base
  misc_feature (44)..(44): n is a, c, g, or t
  modified_base (65)..(65): DNP phosphoramidite base
  misc_feature (65)..(65): n is a, c, g, or t
  modified_base (86)..(86): DNP phosphoramidite base
  misc_feature (86)..(86): n is a, c, g, or t
tncgtaaaatcttcaggttattntaacttcttgttgcagaactnggaattcccaaggtgatcaanggttttttatctctgctcaant

SEQ ID NO: 22 - DNA, 87 bp, Artificial Sequence
  Synthetic Probe
  modified_base (2)..(2): DNP phosphoramidite base
  misc_feature (2)..(2): n is a, c, g, or t
  modified_base (23)..(23): DNP phosphoramidite base
  misc_feature (23)..(23): n is a, c, g, or t
  modified_base (44)..(44): DNP phosphoramidite base
  misc_feature (44)..(44): n is a, c, g, or t
  modified_base (65)..(65): DNP phosphoramidite base
  misc_feature (65)..(65): n is a, c, g, or t
  modified_base (86)..(86): DNP phosphoramidite base
  misc_feature (86)..(86): n is a, c, g, or t
tnggatcactcactgttctgagnctaatatacggacctggaagnttatgttccttctttcctttnctcagtactcccactgttagnt

SEQ ID NO: 23 - DNA, 87 bp, Artificial Sequence
  Synthetic Probe
  modified_base (2)..(2): DNP phosphoramidite base
  misc_feature (2)..(2): n is a, c, g, or t
  modified_base (23)..(23): DNP phosphoramidite base
  misc_feature (23)..(23): n is a, c, g, or t
  modified_base (44)..(44): DNP phosphoramidite base
  misc_feature (44)..(44): n is a, c, g, or t
  modified_base (65)..(65): DNP phosphoramidite base
  misc_feature (65)..(65): n is a, c, g, or t
  modified_base (86)..(86): DNP phosphoramidite base
  misc_feature (86)..(86): n is a, c, g, or t
tnattccatttcagccacctgtngttgcatttccttctccctgnacattggtcatctaattcttncctgtctgagatgccctcagnt

SEQ ID NO: 24 - DNA, 87 bp, Artificial Sequence
  Synthetic Probe
  modified_base (2)..(2): DNP phosphoramidite base
  misc_feature (2)..(2): n is a, c, g, or t
  modified_base (23)..(23): DNP phosphoramidite base
  misc_feature (23)..(23): n is a, c, g, or t
  modified_base (44)..(44): DNP phosphoramidite base
  misc_feature (44)..(44): n is a, c, g, or t
  modified_base (65)..(65): DNP phosphoramidite base
  misc_feature (65)..(65): n is a, c, g, or t
  modified_base (86)..(86): DNP phosphoramidite base
  misc_feature (86)..(86): n is a, c, g, or t
tncaaataaaatcgcccatgganactccaataaagggaacaaancaacagcagaactgttgagantggtggcagggaggggcacant

SEQ ID NO: 25 - DNA, 87 bp, Artificial Sequence
  Synthetic Probe
  modified_base (2)..(2): DNP phosphoramidite base
  misc_feature (2)..(2): n is a, c, g, or t
  modified_base (23)..(23): DNP phosphoramidite base
  misc_feature (23)..(23): n is a, c, g, or t
  modified_base (44)..(44): DNP phosphoramidite base
  misc_feature (44)..(44): n is a, c, g, or t
  modified_base (65)..(65): DNP phosphoramidite base
  misc_feature (65)..(65): n is a, c, g, or t
  modified_base (86)..(86): DNP phosphoramidite base
  misc_feature (86)..(86): n is a, c, g, or t
tngcagctgcctggccccaaagnagatactcaggaaacatgtcntcccttcctatcctatccttngtctcagtattactgtgtgtnt

SEQ ID NO: 26 - DNA, 87 bp, Artificial Sequence
  Synthetic Probe
  modified_base (2)..(2): DNP phosphoramidite base
  misc_feature (2)..(2): n is a, c, g, or t
  modified_base (23)..(23): DNP phosphoramidite base
  misc_feature (23)..(23): n is a, c, g, or t
  modified_base (44)..(44): DNP phosphoramidite base
  misc_feature (44)..(44): n is a, c, g, or t
  modified_base (65)..(65): DNP phosphoramidite base
  misc_feature (65)..(65): n is a, c, g, or t
  modified_base (86)..(86): DNP phosphoramidite base
  misc_feature (86)..(86): n is a, c, g, or t
tnagtttgaaacaaagtagaacnaaagtttctttaagccacacntgacccctagagacagagggnattacaaaaatgttccagtant

SEQ ID NO: 27 - DNA, 87 bp, Artificial Sequence
  Synthetic Probe
  modified_base (2)..(2): DNP phosphoramidite base
  misc_feature (2)..(2): n is a, c, g, or t
  modified_base (23)..(23): DNP phosphoramidite base
  misc_feature (23)..(23): n is a, c, g, or t
  modified_base (44)..(44): DNP phosphoramidite base
  misc_feature (44)..(44): n is a, c, g, or t
  modified_base (65)..(65): DNP phosphoramidite base
  misc_feature (65)..(65): n is a, c, g, or t
  modified_base (86)..(86): DNP phosphoramidite base
  misc_feature (86)..(86): n is a, c, g, or t
tngtcagagaaacttgacagttnttaaaaagagaagcaaaggcnatttgccgaattgaccatttnacaggacaggatgtgtacaant

SEQ ID NO: 28 - DNA, 87 bp, Artificial Sequence
  Synthetic Probe
  modified_base (2)..(2): DNP phosphoramidite base
  misc_feature (2)..(2): n is a, c, g, or t
  modified_base (23)..(23): DNP phosphoramidite base
  misc_feature (23)..(23): n is a, c, g, or t
  modified_base (44)..(44): DNP phosphoramidite base
  misc_feature (44)..(44): n is a, c, g, or t
  modified_base (65)..(65): DNP phosphoramidite base
  misc_feature (65)..(65): n is a, c, g, or t
  modified_base (86)..(86): DNP phosphoramidite base
  misc_feature (86)..(86): n is a, c, g, or t
tnacctgaggctggcaaaagtgnactcagacaagatcctggaancactgtcaatgaaggtagganggagtcccaggtagctatgcnt

SEQ ID NO: 29 - DNA, 87 bp, Artificial Sequence
  Synthetic Probe
  modified_base (2)..(2): DNP phosphoramidite base
  misc_feature (2)..(2): n is a, c, g, or t
  modified_base (23)..(23): DNP phosphoramidite base
  misc_feature (23)..(23): n is a, c, g, or t
  modified_base (44)..(44): DNP phosphoramidite base
  misc_feature (44)..(44): n is a, c, g, or t
  modified_base (65)..(65): DNP phosphoramidite base
  misc_feature (65)..(65): n is a, c, g, or t
  modified_base (86)..(86): DNP phosphoramidite base
  misc_feature (86)..(86): n is a, c, g, or t
tnatggactgagaggggaatggnatggcacagaagctgccatanggttggttgtggatgagtgcnatggggtttattcaagaatcnt

SEQ ID NO: 30 - DNA, 87 bp, Artificial Sequence
  Synthetic Probe
  modified_base (2)..(2): DNP phosphoramidite base
  misc_feature (2)..(2): n is a, c, g, or t
  modified_base (23)..(23): DNP phosphoramidite base
  misc_feature (23)..(23): n is a, c, g, or t
  modified_base (44)..(44): DNP phosphoramidite base
  misc_feature (44)..(44): n is a, c, g, or t
  modified_base (65)..(65): DNP phosphoramidite base
  misc_feature (65)..(65): n is a, c, g, or t
  modified_base (86)..(86): DNP phosphoramidite base
  misc_feature (86)..(86): n is a, c, g, or t
tntaattacttaagccacttganatcaagggtcttttcagaatntctctttccagtgtgacctcntaatcttgtaaagcagatacnt

SEQ ID NO: 31 - DNA, 87 bp, Artificial Sequence
  Synthetic Probe
  modified_base (2)..(2): DNP phosphoramidite base
  misc_feature (2)..(2): n is a, c, g, or t
  modified_base (23)..(23): DNP phosphoramidite base
  misc_feature (23)..(23): n is a, c, g, or t
  modified_base (44)..(44): DNP phosphoramidite base
  misc_feature (44)..(44): n is a, c, g, or t
  modified_base (65)..(65): DNP phosphoramidite base
  misc_feature (65)..(65): n is a, c, g, or t
  modified_base (86)..(86): DNP phosphoramidite base
  misc_feature (86)..(86): n is a, c, g, or t
tngaggccaagtaagccaggctncagcccctccaatactacaantccacacaggcagcaaacacnatctgctttttctgtttaatnt

SEQ ID NO: 32 - DNA, 87 bp, Artificial Sequence
  Synthetic Probe
  modified_base (2)..(2): DNP phosphoramidite base
  misc_feature (2)..(2): n is a, c, g, or t
  modified_base (23)..(23): DNP phosphoramidite base
  misc_feature (23)..(23): n is a, c, g, or t
  modified_base (44)..(44): DNP phosphoramidite base
  misc_feature (44)..(44): n is a, c, g, or t
  modified_base (65)..(65): DNP phosphoramidite base
  misc_feature (65)..(65): n is a, c, g, or t
  modified_base (86)..(86): DNP phosphoramidite base
  misc_feature (86)..(86): n is a, c, g, or t
tntgtgtatgtcaaataccttgnacagaatagcaatggcctgtntaatcagagcacacgttaaantggccccaccacctgctttant

SEQ ID NO: 33 - DNA, 87 bp, Artificial Sequence
  Synthetic Probe
  modified_base (2)..(2): DNP phosphoramidite base
  misc_feature (2)..(2): n is a, c, g, or t
  modified_base (23)..(23): DNP phosphoramidite base
  misc_feature (23)..(23): n is a, c, g, or t
  modified_base (44)..(44): DNP phosphoramidite base
  misc_feature (44)..(44): n is a, c, g, or t
  modified_base (65)..(65): DNP phosphoramidite base
  misc_feature (65)..(65): n is a, c, g, or t
  modified_base (86)..(86): DNP phosphoramidite base
  misc_feature (86)..(86): n is a, c, g, or t
tnacctgagcgtaaatgtccttntcatccatataaattattccnagtcgggtatctgtggggctnactgattcatcaaaaggtcant

SEQ ID NO: 34 - DNA, 87 bp, Artificial Sequence
  Synthetic Probe
  modified_base (2)..(2): DNP phosphoramidite base
  misc_feature (2)..(2): n is a, c, g, or t
  modified_base (23)..(23): DNP phosphoramidite base
  misc_feature (23)..(23): n is a, c, g, or t
  modified_base (44)..(44): DNP phosphoramidite base
  misc_feature (44)..(44): n is a, c, g, or t
  modified_base (65)..(65): DNP phosphoramidite base
  misc_feature (65)..(65): n is a, c, g, or t
  modified_base (86)..(86): DNP phosphoramidite base
  misc_feature (86)..(86): n is a, c, g, or t
tncaggacaggagcaaaaattanggtcacagactagattggtgnggctcacctcccctgcagctngttgcactctggaccctggant

SEQ ID NO: 35 - DNA, 87 bp, Artificial Sequence
  Synthetic Probe
  modified_base (2)..(2): DNP phosphoramidite base
  misc_feature (2)..(2): n is a, c, g, or t
  modified_base (23)..(23): DNP phosphoramidite base
  misc_feature (23)..(23): n is a, c, g, or t
  modified_base (44)..(44): DNP phosphoramidite base
  misc_feature (44)..(44): n is a, c, g, or t
  modified_base (65)..(65): DNP phosphoramidite base
  misc_feature (65)..(65): n is a, c, g, or t
  modified_base (86)..(86): DNP phosphoramidite base
  misc_feature (86)..(86): n is a, c, g, or t
tntttcagcttctaccatgaaangtcaggttcagccatgggacnttcccaaaataaaggaagggngtccagacccagggaagctant

SEQ ID NO: 36 - DNA, 87 bp, Artificial Sequence
  Synthetic Probe
  modified_base (2)..(2): DNP phosphoramidite base
  misc_feature (2)..(2): n is a, c, g, or t
  modified_base (23)..(23): DNP phosphoramidite base
  misc_feature (23)..(23): n is a, c, g, or t
  modified_base (44)..(44): DNP phosphoramidite base
  misc_feature (44)..(44): n is a, c, g, or t
  modified_base (65)..(65): DNP phosphoramidite base
  misc_feature (65)..(65): n is a, c, g, or t
  modified_base (86)..(86): DNP phosphoramidite base
  misc_feature (86)..(86): n is a, c, g, or t
tnttccattcctgacgagatttnattgctgtcaattgcggttgncctatagctttccactgcttnttgttcctggagggttaattnt

SEQ ID NO: 37 - DNA, 87 bp, Artificial Sequence
  Synthetic Probe
  modified_base (2)..(2): DNP phosphoramidite base
  misc_feature (2)..(2): n is a, c, g, or t
  modified_base (23)..(23): DNP phosphoramidite base
  misc_feature (23)..(23): n is a, c, g, or t
  modified_base (44)..(44): DNP phosphoramidite base
  misc_feature (44)..(44): n is a, c, g, or t
  modified_base (65)..(65): DNP phosphoramidite base
  misc_feature (65)..(65): n is a, c, g, or t
  modified_base (86)..(86): DNP phosphoramidite base
  misc_feature (86)..(86): n is a, c, g, or t
tngttgattttgtgcccagtcanctatttatagatggagataantcccagattcggacagctggntctggccatagttctgagatnt

SEQ ID NO: 38 - DNA, 87 bp, Artificial Sequence
  Synthetic Probe
  modified_base (2)..(2): DNP phosphoramidite base
  misc_feature (2)..(2): n is a, c, g, or t
  modified_base (23)..(23): DNP phosphoramidite base
  misc_feature (23)..(23): n is a, c, g, or t
  modified_base (44)..(44): DNP phosphoramidite base
  misc_feature (44)..(44): n is a, c, g, or t
  modified_base (65)..(65): DNP phosphoramidite base
  misc_feature (65)..(65): n is a, c, g, or t
  modified_base (86)..(86): DNP phosphoramidite base
  misc_feature (86)..(86): n is a, c, g, or t
tnagaatacctaagaatacatcntttttatgcaggaatgaagcnttcccctctatgcagataggnctcctagcatcctgtgagcant

SEQ ID NO: 39 - DNA, 87 bp, Artificial Sequence
  Synthetic Probe
  modified_base (2)..(2): DNP phosphoramidite base
  misc_feature (2)..(2): n is a, c, g, or t
  modified_base (23)..(23): DNP phosphoramidite base
  misc_feature (23)..(23): n is a, c, g, or t
  modified_base (44)..(44): DNP phosphoramidite base
  misc_feature (44)..(44): n is a, c, g, or t
  modified_base (65)..(65): DNP phosphoramidite base
  misc_feature (65)..(65): n is a, c, g, or t
  modified_base (86)..(86): DNP phosphoramidite base
  misc_feature (86)..(86): n is a, c, g, or t
tnctgacttcttgctggtattcntgcttcttaccaaaaccaggnatcataatgttgggctagctngcaacatttgtttgccaaccnt

SEQ ID NO: 40 - DNA, 87 bp, Artificial Sequence
  Synthetic Probe
  modified_base (2)..(2): DNP phosphoramidite base
  misc_feature (2)..(2): n is a, c, g, or t
  modified_base (23)..(23): DNP phosphoramidite base
  misc_feature (23)..(23): n is a, c, g, or t
  modified_base (44)..(44): DNP phosphoramidite base
  misc_feature (44)..(44): n is a, c, g, or t
  modified_base (65)..(65): DNP phosphoramidite base
  misc_feature (65)..(65): n is a, c, g, or t
  modified_base (86)..(86): DNP phosphoramidite base
  misc_feature (86)..(86): n is a, c, g, or t
tngagggtgtggggttttctgcntcccctctccaaaccaagtcnagcccccgccagcagctaaanttcatcttagctgagtaggant

SEQ ID NO: 41 - DNA, 87 bp, Artificial Sequence
  Synthetic Probe
  modified_base (2)..(2): DNP phosphoramidite base
  misc_feature (2)..(2): n is a, c, g, or t
  modified_base (23)..(23): DNP phosphoramidite base
  misc_feature (23)..(23): n is a, c, g, or t
  modified_base (44)..(44): DNP phosphoramidite base
  misc_feature (44)..(44): n is a, c, g, or t
  modified_base (65)..(65): DNP phosphoramidite base
  misc_feature (65)..(65): n is a, c, g, or t
  modified_base (86)..(86): DNP phosphoramidite base
  misc_feature (86)..(86): n is a, c, g, or t
tncccacgaacacaattacaagnatagataccctttcttccagnaggctacaaaccagtaacctnctggctgaaaaataggctttnt

SEQ ID NO: 42 - DNA, 87 bp, Artificial Sequence
  Synthetic Probe
  modified_base (2)..(2): DNP phosphoramidite base
  misc_feature (2)..(2): n is a, c, g, or t
  modified_base (23)..(23): DNP phosphoramidite base
  misc_feature (23)..(23): n is a, c, g, or t
  modified_base (44)..(44): DNP phosphoramidite base
  misc_feature (44)..(44): n is a, c, g, or t
  modified_base (65)..(65): DNP phosphoramidite base
  misc_feature (65)..(65): n is a, c, g, or t
  modified_base (86)..(86): DNP phosphoramidite base
  misc_feature (86)..(86): n is a, c, g, or t
tnttctgaattctcatgctcacntgctcgtgtaacccaggacanaatcagtgctaccctctaggnaccagtaattaaagtgattant

SEQ ID NO: 43 - DNA, 87 bp, Artificial Sequence
  Synthetic Probe
  modified_base (2)..(2): DNP phosphoramidite base
  misc_feature (2)..(2): n is a, c, g, or t
  modified_base (23)..(23): DNP phosphoramidite base
  misc_feature (23)..(23): n is a, c, g, or t
  modified_base (44)..(44): DNP phosphoramidite base
  misc_feature (44)..(44): n is a, c, g, or t
  modified_base (65)..(65): DNP phosphoramidite base
  misc_feature (65)..(65): n is a, c, g, or t
  modified_base (86)..(86): DNP phosphoramidite base
  misc_feature (86)..(86): n is a, c, g, or t
tngaaagaatttctgttgacctnccagtgattggaatacctctnttatgcagcagaagttcctcntttgccaattaaaaagtcctnt

SEQ ID NO: 44 - DNA, 87 bp, Artificial Sequence
  Synthetic Probe
  modified_base (2)..(2): DNP phosphoramidite base
  misc_feature (2)..(2): n is a, c, g, or t
  modified_base (23)..(23): DNP phosphoramidite base
  misc_feature (23)..(23): n is a, c, g, or t
  modified_base (44)..(44): DNP phosphoramidite base
  misc_feature (44)..(44): n is a, c, g, or t
  modified_base (65)..(65): DNP phosphoramidite base
  misc_feature (65)..(65): n is a, c, g, or t
  modified_base (86)..(86): DNP phosphoramidite base
  misc_feature (86)..(86): n is a, c, g, or t
tncatttctctctgtgtaatagncacaccctgttcctggctgangaagaaaacaaaattaacctntgggctggcggctgtgctgcnt

SEQ ID NO: 45 - DNA, 87 bp, Artificial Sequence
  Synthetic Probe
  modified_base (2)..(2): DNP phosphoramidite base
  misc_feature (2)..(2): n is a, c, g, or t
  modified_base (23)..(23): DNP phosphoramidite base
  misc_feature (23)..(23): n is a, c, g, or t
  modified_base (44)..(44): DNP phosphoramidite base
  misc_feature (44)..(44): n is a, c, g, or t
  modified_base (65)..(65): DNP phosphoramidite base
  misc_feature (65)..(65): n is a, c, g, or t
  modified_base (86)..(86): DNP phosphoramidite base
  misc_feature (86)..(86): n is a, c, g, or t
tntatgcaaagaagcaaatgtanaaaggacagctctgagatccnaaattgaggtgctgtagcacnagttgctttagtggaactacnt

SEQ ID NO: 46 - DNA, 87 bp, Artificial Sequence
  Synthetic Probe
  modified_base (2)..(2): DNP phosphoramidite base
  misc_feature (2)..(2): n is a, c, g, or t
  modified_base (23)..(23): DNP phosphoramidite base
  misc_feature (23)..(23): n is a, c, g, or t
  modified_base (44)..(44): DNP phosphoramidite base
  misc_feature (44)..(44): n is a, c, g, or t
  modified_base (65)..(65): DNP phosphoramidite base
  misc_feature (65)..(65): n is a, c, g, or t
  modified_base (86)..(86): DNP phosphoramidite base
  misc_feature (86)..(86): n is a, c, g, or t
tngattaattctttctcttggtntattccaaagtgcttctttcngctcttccccgagacactganggtgttttgataacgactcant

SEQ ID NO: 47 - DNA, 87 bp, Artificial Sequence
  Synthetic Probe
  modified_base (2)..(2): DNP phosphoramidite base
  misc_feature (2)..(2): n is a, c, g, or t
  modified_base (23)..(23): DNP phosphoramidite base
  misc_feature (23)..(23): n is a, c, g, or t
  modified_base (44)..(44): DNP phosphoramidite base
  misc_feature (44)..(44): n is a, c, g, or t
  modified_base (65)..(65): DNP phosphoramidite base
  misc_feature (65)..(65): n is a, c, g, or t
  modified_base (86)..(86): DNP phosphoramidite base
  misc_feature (86)..(86): n is a, c, g, or t
tnttaagaacatttgcaaaatangtcacatagagccttaagatngccacagttcaaatgagaggnactcctcctctccggcatagnt

SEQ ID NO: 48 - DNA, 87 bp, Artificial Sequence
  Synthetic Probe
  modified_base (2)..(2): DNP phosphoramidite base
  misc_feature (2)..(2): n is a, c, g, or t
  modified_base (23)..(23): DNP phosphoramidite base
  misc_feature (23)..(23): n is a, c, g, or t
  modified_base (44)..(44): DNP phosphoramidite base
  misc_feature (44)..(44): n is a, c, g, or t
  modified_base (65)..(65): DNP phosphoramidite base
  misc_feature (65)..(65): n is a, c, g, or t
  modified_base (86)..(86): DNP phosphoramidite base
  misc_feature (86)..(86): n is a, c, g, or t
tnacccagtcaccacggataagnacttgggagtgaggagacaantggcgcaaagcagaccccaancctctccacaggcaggggcant

SEQ ID NO: 49 - DNA, 87 bp, Artificial Sequence
  Synthetic Probe
  modified_base (2)..(2): DNP phosphoramidite base
  misc_feature (2)..(2): n is a, c, g, or t
  modified_base (23)..(23): DNP phosphoramidite base
  misc_feature (23)..(23): n is a, c, g, or t
  modified_base (44)..(44): DNP phosphoramidite base
  misc_feature (44)..(44): n is a, c, g, or t
  modified_base (65)..(65): DNP phosphoramidite base
  misc_feature (65)..(65): n is a, c, g, or t
  modified_base (86)..(86): DNP phosphoramidite base
  misc_feature (86)..(86): n is a, c, g, or t
tnatggcagagtcacggagtggncaaactccaaacccccatggnctaatcctcaccgttcttcanctaggtttctgcaagacctant

SEQ ID NO: 50 - DNA, 87 bp, Artificial Sequence
  Synthetic Probe
  modified_base (2)..(2): DNP phosphoramidite base
  misc_feature (2)..(2): n is a, c, g, or t
  modified_base (23)..(23): DNP phosphoramidite base
  misc_feature (23)..(23): n is a, c, g, or t
  modified_base (44)..(44): DNP phosphoramidite base
  misc_feature (44)..(44): n is a, c, g, or t
  modified_base (65)..(65): DNP phosphoramidite base
  misc_feature (65)..(65): n is a, c, g, or t
  modified_base (86)..(86): DNP phosphoramidite base
  misc_feature (86)..(86): n is a, c, g, or t
tntgtgaatttatctgcaatgtncagaggtaatgtaaaaccatnaagaaggtgactcctattgancctccagtcccaacaaggacnt

SEQ ID NO: 51 - DNA, 87 bp, Artificial Sequence
  Synthetic Probe
  modified_base (2)..(2): DNP phosphoramidite base
  misc_feature (2)..(2): n is a, c, g, or t
  modified_base (23)..(23): DNP phosphoramidite base
  misc_feature (23)..(23): n is a, c, g, or t
  modified_base (44)..(44): DNP phosphoramidite base
  misc_feature (44)..(44): n is a, c, g, or t
  modified_base (65)..(65): DNP phosphoramidite base
  misc_feature (65)..(65): n is a, c, g, or t
  modified_base (86)..(86): DNP phosphoramidite base
  misc_feature (86)..(86): n is a, c, g, or t
tngaataattgagacatttaggncatttctataaaaagccacangcatgtcacctgccaggaagnaacgcctctataaggcaacant

SEQ ID NO: 52 - DNA, 87 bp, Artificial Sequence
  Synthetic Probe
  modified_base (2)..(2): DNP phosphoramidite base
  misc_feature (2)..(2): n is a, c, g, or t
  modified_base (23)..(23): DNP phosphoramidite base
  misc_feature (23)..(23): n is a, c, g, or t
  modified_base (44)..(44): DNP phosphoramidite base
  misc_feature (44)..(44): n is a, c, g, or t
  modified_base (65)..(65): DNP phosphoramidite base
  misc_feature (65)..(65): n is a, c, g, or t
  modified_base (86)..(86): DNP phosphoramidite base
  misc_feature (86)..(86): n is a, c, g, or t
tnctcaacacccctctctcatcnatacccttagcccatcttctnaggacacccagaaaggggagngatcatagggccgattgttant

SEQ ID NO: 53 - DNA, 87 bp, Artificial Sequence
  Synthetic Probe
  modified_base (2)..(2): DNP phosphoramidite base
  misc_feature (2)..(2): n is a, c, g, or t
  modified_base (23)..(23): DNP phosphoramidite base
  misc_feature (23)..(23): n is a, c, g, or t
  modified_base (44)..(44): DNP phosphoramidite base
  misc_feature (44)..(44): n is a, c, g, or t
  modified_base (65)..(65): DNP phosphoramidite base
  misc_feature (65)..(65): n is a, c, g, or t
  modified_base (86)..(86): DNP phosphoramidite base
  misc_feature (86)..(86): n is a, c, g, or t
tntagatgaaatgaataagaggnttcactaaattaatggctgtncaattgggccaaccaacagtnagtcccgggcccctgagttcnt

SEQ ID NO: 54 - DNA, 87 bp, Artificial Sequence
  Synthetic Probe
  modified_base (2)..(2): DNP phosphoramidite base
  misc_feature (2)..(2): n is a, c, g, or t
  modified_base (23)..(23): DNP phosphoramidite base
  misc_feature (23)..(23): n is a, c, g, or t
  modified_base (44)..(44): DNP phosphoramidite base
  misc_feature (44)..(44): n is a, c, g, or t
  modified_base (65)..(65): DNP phosphoramidite base
  misc_feature (65)..(65): n is a, c, g, or t
  modified_base (86)..(86): DNP phosphoramidite base
  misc_feature (86)..(86): n is a, c, g, or t
tnatggagaagaaagagaagctnccattgtgtttgtttttctcncccagcagggctgtcatttanagtcgtcaaagggtaatggant

SEQ ID NO: 55 - DNA, 87 bp, Artificial Sequence
  Synthetic Probe
  modified_base (2)..(2): DNP phosphoramidite base
  misc_feature (2)..(2): n is a, c, g, or t
  modified_base (23)..(23): DNP phosphoramidite base
  misc_feature (23)..(23): n is a, c, g, or t
  modified_base (44)..(44): DNP phosphoramidite base
  misc_feature (44)..(44): n is a, c, g, or t
  modified_base (65)..(65): DNP phosphoramidite base
  misc_feature (65)..(65): n is a, c, g, or t
  modified_base (86)..(86): DNP phosphoramidite base
  misc_feature (86)..(86): n is a, c, g, or t
tnaacgtggcagtgcctggaaancttttcatattcagctttggnaaagacagattggctctaggnaggctccatatatcaagggant

SEQ ID NO: 56 - DNA, 87 bp, Artificial Sequence
  Synthetic Probe
  modified_base (2)..(2): DNP phosphoramidite base
  misc_feature (2)..(2): n is a, c, g, or t
  modified_base (23)..(23): DNP phosphoramidite base
  misc_feature (23)..(23): n is a, c, g, or t
  modified_base (44)..(44): DNP phosphoramidite base
  misc_feature (44)..(44): n is a, c, g, or t
  modified_base (65)..(65): DNP phosphoramidite base
  misc_feature (65)..(65): n is a, c, g, or t
  modified_base (86)..(86): DNP phosphoramidite base
  misc_feature (86)..(86): n is a, c, g, or t
tntaggataggagcaaatataanttcaaaggcaacctttcaggntcctgaccctggttctgcctngacaggcaaaatcctaacagnt

SEQ ID NO: 57 - DNA, 87 bp, Artificial Sequence
  Synthetic Probe
  modified_base (2)..(2): DNP phosphoramidite base
  misc_feature (2)..(2): n is a, c, g, or t
  modified_base (23)..(23): DNP phosphoramidite base
  misc_feature (23)..(23): n is a, c, g, or t
  modified_base (44)..(44): DNP phosphoramidite base
  misc_feature (44)..(44): n is a, c, g, or t
  modified_base (65)..(65): DNP phosphoramidite base
  misc_feature (65)..(65): n is a, c, g, or t
  modified_base (86)..(86): DNP phosphoramidite base
  misc_feature (86)..(86): n is a, c, g, or t
tntaagagacaaaacagattcangttttcaagcaggatcaaatngacaggagaaacagtgtccancctagcagaatagtgaagtgnt

SEQ ID NO: 58 - DNA, 87 bp, Artificial Sequence
  Synthetic Probe
  modified_base (2)..(2): DNP phosphoramidite base
  misc_feature (2)..(2): n is a, c, g, or t
  modified_base (23)..(23): DNP phosphoramidite base
  misc_feature (23)..(23): n is a, c, g, or t
  modified_base (44)..(44): DNP phosphoramidite base
  misc_feature (44)..(44): n is a, c, g, or t
  modified_base (65)..(65): DNP phosphoramidite base
  misc_feature (65)..(65): n is a, c, g, or t
  modified_base (86)..(86): DNP phosphoramidite base
  misc_feature (86)..(86): n is a, c, g, or t
tngacatgaagcaagatcaaatntgcctgaggtgaaactactgnctcagctctgcttatcagcanatgtcgtggccagtgatatgnt

SEQ ID NO: 59 - DNA, 87 bp, Artificial Sequence
  Synthetic Probe
  modified_base (2)..(2): DNP phosphoramidite base
  misc_feature (2)..(2): n is a, c, g, or t
  modified_base (23)..(23): DNP phosphoramidite base
  misc_feature (23)..(23): n is a, c, g, or t
  modified_base (44)..(44): DNP phosphoramidite base
  misc_feature (44)..(44): n is a, c, g, or t
  modified_base (65)..(65): DNP phosphoramidite base
  misc_feature (65)..(65): n is a, c, g, or t
  modified_base (86)..(86): DNP phosphoramidite base
  misc_feature (86)..(86): n is a, c, g, or t
tnaagtgtccatatcagattcangctgtgacaactagaatagangtcttcacttgtccctgatcncaagcagagaaacttagaagnt

SEQ ID NO: 60 - DNA, 87 bp, Artificial Sequence
  Synthetic Probe
  modified_base (2)..(2): DNP phosphoramidite base
  misc_feature (2)..(2): n is a, c, g, or t
  modified_base (23)..(23): DNP phosphoramidite base
  misc_feature (23)..(23): n is a, c, g, or t
  modified_base (44)..(44): DNP phosphoramidite base
  misc_feature (44)..(44): n is a, c, g, or t
  modified_base (65)..(65): DNP phosphoramidite base
  misc_feature (65)..(65): n is a, c, g, or t
  modified_base (86)..(86): DNP phosphoramidite base
  misc_feature (86)..(86): n is a, c, g, or t
tnaaagtttgtcatttgaatganctgaatgttgagtcactcctnttctgaccatggtttcttgtnactagtgctagtaaaaggacnt

SEQ ID NO: 61 - DNA, 87 bp, Artificial Sequence
  Synthetic Probe
  modified_base (2)..(2): DNP phosphoramidite base
  misc_feature (2)..(2): n is a, c, g, or t
  modified_base (23)..(23): DNP phosphoramidite base
  misc_feature (23)..(23): n is a, c, g, or t
  modified_base (44)..(44): DNP phosphoramidite base
  misc_feature (44)..(44): n is a, c, g, or t
  modified_base (65)..(65): DNP phosphoramidite base
  misc_feature (65)..(65): n is a, c, g, or t
  modified_base (86)..(86): DNP phosphoramidite base
  misc_feature (86)..(86): n is a, c, g, or t
tntctggaaaccactcaggttgntgcctgactacaaggcacccncaaacccttcctagggtttcnacagcaatgctgggagaagcnt

SEQ ID NO: 62 - DNA, 87 bp, Artificial Sequence
  Synthetic Probe
  modified_base (2)..(2): DNP phosphoramidite base
  misc_feature (2)..(2): n is a, c, g, or t
  modified_base (23)..(23): DNP phosphoramidite base
  misc_feature (23)..(23): n is a, c, g, or t
  modified_base (44)..(44): DNP phosphoramidite base
  misc_feature (44)..(44): n is a, c, g, or t
  modified_base (65)..(65): DNP phosphoramidite base
  misc_feature (65)..(65): n is a, c, g, or t
  modified_base (86)..(86): DNP phosphoramidite base
  misc_feature (86)..(86): n is a, c, g, or t
tncctgtcatttccaaaacatgntaagatgctcaggtactgtgngtttctggaagtgcggtgtgngagaaccaatagaggagaaant

SEQ ID NO: 63 - DNA, 87 bp, Artificial Sequence
  Synthetic Probe
  modified_base (2)..(2): DNP phosphoramidite base
  misc_feature (2)..(2): n is a, c, g, or t
  modified_base (23)..(23): DNP phosphoramidite base
  misc_feature (23)..(23): n is a, c, g, or t
  modified_base (44)..(44): DNP phosphoramidite base
  misc_feature (44)..(44): n is a, c, g, or t
  modified_base (65)..(65): DNP phosphoramidite base
  misc_feature (65)..(65): n is a, c, g, or t
  modified_base (86)..(86): DNP phosphoramidite base
  misc_feature (86)..(86): n is a, c, g, or t
tnttggaaaaacaagaccaaganccaatttacccttcctacttncatattctcactccctaggcnaaatttaatttgggtcactgnt

SEQ ID NO: 64 - DNA, 87 bp, Artificial Sequence
  Synthetic Probe
  modified_base (2)..(2): DNP phosphoramidite base
  misc_feature (2)..(2): n is a, c, g, or t
  modified_base (23)..(23): DNP phosphoramidite base
  misc_feature (23)..(23): n is a, c, g, or t
  modified_base (44)..(44): DNP phosphoramidite base
  misc_feature (44)..(44): n is a, c, g, or t
  modified_base (65)..(65): DNP phosphoramidite base
  misc_feature (65)..(65): n is a, c, g, or t
  modified_base (86)..(86): DNP phosphoramidite base
  misc_feature (86)..(86): n is a, c, g, or t
tngaaaatgaagaattcttttcntgtaggtaagctcctacactntgcacccctgatgccattacncatcatctccaacaagtgctnt

SEQ ID NO: 65 - DNA, 87 bp, Artificial Sequence
  Synthetic Probe
  modified_base (2)..(2): DNP phosphoramidite base
  misc_feature (2)..(2): n is a, c, g, or t
  modified_base (23)..(23): DNP phosphoramidite base
  misc_feature (23)..(23): n is a, c, g, or t
  modified_base (44)..(44): DNP phosphoramidite base
  misc_feature (44)..(44): n is a, c, g, or t
  modified_base (65)..(65): DNP phosphoramidite base
  misc_feature (65)..(65): n is a, c, g, or t
  modified_base (86)..(86): DNP phosphoramidite base
  misc_feature (86)..(86): n is a, c, g, or t
tnatatggatcctgatttccaanttcaacactttcccactctgntcatcctttacagacttaagnctgcaaaaacagtcctcagtnt

SEQ ID NO: 66 - DNA, 87 bp, Artificial Sequence
  Synthetic Probe
  modified_base (2)..(2): DNP phosphoramidite base
  misc_feature (2)..(2): n is a, c, g, or t
  modified_base (23)..(23): DNP phosphoramidite base
  misc_feature (23)..(23): n is a, c, g, or t
  modified_base (44)..(44): DNP phosphoramidite base
  misc_feature (44)..(44): n is a, c, g, or t
  modified_base (65)..(65): DNP phosphoramidite base
  misc_feature (65)..(65): n is a, c, g, or t
  modified_base (86)..(86): DNP phosphoramidite base
  misc_feature (86)..(86): n is a, c, g, or t
tncagataaaaactcatatcctnccacaaggtggttttcaaccnaaacatcctgctttaaagttnagttcaccaaccacaaactgnt

SEQ ID NO: 67 - DNA, 87 bp, Artificial Sequence
  Synthetic Probe
  modified_base (2)..(2): DNP phosphoramidite base
  misc_feature (2)..(2): n is a, c, g, or t
  modified_base (23)..(23): DNP phosphoramidite base
  misc_feature (23)..(23): n is a, c, g, or t
  modified_base (44)..(44): DNP phosphoramidite base
  misc_feature (44)..(44): n is a, c, g, or t
  modified_base (65)..(65): DNP phosphoramidite base
  misc_feature (65)..(65): n is a, c, g, or t
  modified_base (86)..(86): DNP phosphoramidite base
  misc_feature (86)..(86): n is a, c, g, or t
tngtccacaaggtggcactagantaccgttggtcaaagtccatnaacctagtaaggatttctagnaaaacagggttagagaggtgnt

SEQ ID NO: 68 - DNA, 87 bp, Artificial Sequence
  Synthetic Probe
  modified_base (2)..(2): DNP phosphoramidite base
  misc_feature (2)..(2): n is a, c, g, or t
  modified_base (23)..(23): DNP phosphoramidite base
  misc_feature (23)..(23): n is a, c, g, or t
  modified_base (44)..(44): DNP phosphoramidite base
  misc_feature (44)..(44): n is a, c, g, or t
  modified_base (65)..(65): DNP phosphoramidite base
  misc_feature (65)..(65): n is a, c, g, or t
  modified_base (86)..(86): DNP phosphoramidite base
  misc_feature (86)..(86): n is a, c, g, or t
tntaaagatttatccaaaatgcncaagcataagttatagactgncctatggtggagtgtatttcnttccagtggcaaatttacatnt

SEQ ID NO: 69 - DNA, 87 bp, Artificial Sequence
  Synthetic Probe
  modified_base (2)..(2): DNP phosphoramidite base
  misc_feature (2)..(2): n is a, c, g, or t
  modified_base (23)..(23): DNP phosphoramidite base
  misc_feature (23)..(23): n is a, c, g, or t
  modified_base (44)..(44): DNP phosphoramidite base
  misc_feature (44)..(44): n is a, c, g, or t
  modified_base (65)..(65): DNP phosphoramidite base
  misc_feature (65)..(65): n is a, c, g, or t
  modified_base (86)..(86): DNP phosphoramidite base
  misc_feature (86)..(86): n is a, c, g, or t
tnggttgattctactgccaaccntaaaagcttacagtacttgcnatgatttccagaagaccatgngcagactgtgtgcagactgant

SEQ ID NO: 70 - DNA, 87 bp, Artificial Sequence
  Synthetic Probe
  modified_base (2)..(2): DNP phosphoramidite base
  misc_feature (2)..(2): n is a, c, g, or t
  modified_base (23)..(23): DNP phosphoramidite base
  misc_feature (23)..(23): n is a, c, g, or t
  modified_base (44)..(44): DNP phosphoramidite base
  misc_feature (44)..(44): n is a, c, g, or t
  modified_base (65)..(65): DNP phosphoramidite base
  misc_feature (65)..(65): n is a, c, g, or t
  modified_base (86)..(86): DNP phosphoramidite base
  misc_feature (86)..(86): n is a, c, g, or t
tntgaatggagaacccacagtcnatcgagaatcggcatcaaaantaacgtctcagtgatgacaantttaccttcttcccttgatcnt

SEQ ID NO: 71 - DNA, 87 bp, Artificial Sequence
  Synthetic Probe
  modified_base (2)..(2): DNP phosphoramidite base
  misc_feature (2)..(2): n is a, c, g, or t
  modified_base (23)..(23): DNP phosphoramidite base
  misc_feature (23)..(23): n is a, c, g, or t
  modified_base (44)..(44): DNP phosphoramidite base
  misc_feature (44)..(44): n is a, c, g, or t
  modified_base (65)..(65): DNP phosphoramidite base
  misc_feature (65)..(65): n is a, c, g, or t
  modified_base (86)..(86): DNP phosphoramidite base
  misc_feature (86)..(86): n is a, c, g, or t
tntgtcattctgcagccccaganacacagacttccaaagcagtngactggcactccgacccaacnagcatacacagatcttaagcnt

SEQ ID NO: 72 - DNA, 87 bp, Artificial Sequence
  Synthetic Probe
  modified_base (2)..(2): DNP phosphoramidite base
  misc_feature (2)..(2): n is a, c, g, or t
  modified_base (23)..(23): DNP phosphoramidite base
  misc_feature (23)..(23): n is a, c, g, or t
  modified_base (44)..(44): DNP phosphoramidite base
  misc_feature (44)..(44): n is a, c, g, or t
  modified_base (65)..(65): DNP phosphoramidite base
  misc_feature (65)..(65): n is a, c, g, or t
  modified_base (86)..(86): DNP phosphoramidite base
  misc_feature (86)..(86): n is a, c, g, or t
tngttttgcttctgaatctagangcatatttccaaggagaagcnaacttattgtcccagcagatnatatggaatgctttaaagcant

SEQ ID NO: 73 - DNA, 87 bp, Artificial Sequence
  Synthetic Probe
  modified_base (2)..(2): DNP phosphoramidite base
  misc_feature (2)..(2): n is a, c, g, or t
  modified_base (23)..(23): DNP phosphoramidite base
  misc_feature (23)..(23): n is a, c, g, or t
  modified_base (44)..(44): DNP phosphoramidite base
  misc_feature (44)..(44): n is a, c, g, or t
  modified_base (65)..(65): DNP phosphoramidite base
  misc_feature (65)..(65): n is a, c, g, or t
  modified_base (86)..(86): DNP phosphoramidite base
  misc_feature (86)..(86): n is a, c, g, or t
tnacacacgatttacaaaacccncagaaaggtactcaggtaccnaaaagagggcagaacaatganccagccactccaaaagagttnt

SEQ ID NO: 74 - DNA, 87 bp, Artificial Sequence
  Synthetic Probe
  modified_base (2)..(2): DNP phosphoramidite base
  misc_feature (2)..(2): n is a, c, g, or t
  modified_base (23)..(23): DNP phosphoramidite base
  misc_feature (23)..(23): n is a, c, g, or t
  modified_base (44)..(44): DNP phosphoramidite base
  misc_feature (44)..(44): n is a, c, g, or t
  modified_base (65)..(65): DNP phosphoramidite base
  misc_feature (65)..(65): n is a, c, g, or t
  modified_base (86)..(86): DNP phosphoramidite base
  misc_feature (86)..(86): n is a, c, g, or t
tnacatgccatatttgcagagtnagaaacaaactgccctatttngcgctttgccctaggataatnatcactcattctgacatgtgnt

SEQ ID NO: 75 - DNA, 87 bp, Artificial Sequence
  Synthetic Probe
  modified_base (2)..(2): DNP phosphoramidite base
  misc_feature (2)..(2): n is a, c, g, or t
  modified_base (23)..(23): DNP phosphoramidite base
  misc_feature (23)..(23): n is a, c, g, or t
  modified_base (44)..(44): DNP phosphoramidite base
  misc_feature (44)..(44): n is a, c, g, or t
  modified_base (65)..(65): DNP phosphoramidite base
  misc_feature (65)..(65): n is a, c, g, or t
  modified_base (86)..(86): DNP phosphoramidite base
  misc_feature (86)..(86): n is a, c, g, or t
tnctcctagagttgtttaaaacnagctaattatataggggtttngaccctttactcccctctacncttctggtagagcagctgaant

SEQ ID NO: 76 - DNA, 87 bp, Artificial Sequence
  Synthetic Probe
  modified_base (2)..(2): DNP phosphoramidite base
  misc_feature (2)..(2): n is a, c, g, or t
  modified_base (23)..(23): DNP phosphoramidite base
  misc_feature (23)..(23): n is a, c, g, or t
  modified_base (44)..(44): DNP phosphoramidite base
  misc_feature (44)..(44): n is a, c, g, or t
  modified_base (65)..(65): DNP phosphoramidite base
  misc_feature (65)..(65): n is a, c, g, or t
  modified_base (86)..(86): DNP phosphoramidite base
  misc_feature (86)..(86): n is a, c, g, or t
tnaatttttccaaacatcagtgntcaagctcttccaatcaaccnacactgccattcactaagtancaaacgcaacacagatcaagnt

SEQ ID NO: 77 - DNA, 87 bp, Artificial Sequence
  Synthetic Probe
  modified_base (2)..(2): DNP phosphoramidite base
  misc_feature (2)..(2): n is a, c, g, or t
  modified_base (23)..(23): DNP phosphoramidite base
  misc_feature (23)..(23): n is a, c, g, or t
  modified_base (44)..(44): DNP phosphoramidite base
  misc_feature (44)..(44): n is a, c, g, or t
  modified_base (65)..(65): DNP phosphoramidite base
  misc_feature (65)..(65): n is a, c, g, or t
  modified_base (86)..(86): DNP phosphoramidite base
  misc_feature (86)..(86): n is a, c, g, or t
tncaataattctgtctctcttcntctctgtgaaatgctaacacnttgctaaaggcactcagattnctgggcttaacggagacaagnt

SEQ ID NO: 78 - DNA, 87 bp, Artificial Sequence
  Synthetic Probe
  modified_base (2)..(2): DNP phosphoramidite base
  misc_feature (2)..(2): n is a, c, g, or t
  modified_base (23)..(23): DNP phosphoramidite base
  misc_feature (23)..(23): n is a, c, g, or t
  modified_base (44)..(44): DNP phosphoramidite base
  misc_feature (44)..(44): n is a, c, g, or t
  modified_base (65)..(65): DNP phosphoramidite base
  misc_feature (65)..(65): n is a, c, g, or t
  modified_base (86)..(86): DNP phosphoramidite base
  misc_feature (86)..(86): n is a, c, g, or t
tnaagcgttttatgagaagctantttacacagctatttgtccanttcagccagagtgacagtaanctgctcacaatggtaggggtnt

SEQ ID NO: 79 - DNA, 87 bp, Artificial Sequence
  Synthetic Probe
  modified_base (2)..(2): DNP phosphoramidite base
  misc_feature (2)..(2): n is a, c, g, or t
  modified_base (23)..(23): DNP phosphoramidite base
  misc_feature (23)..(23): n is a, c, g, or t
  modified_base (44)..(44): DNP phosphoramidite base
  misc_feature (44)..(44): n is a, c, g, or t
  modified_base (65)..(65): DNP phosphoramidite base
  misc_feature (65)..(65): n is a, c, g, or t
  modified_base (86)..(86): DNP phosphoramidite base
  misc_feature (86)..(86): n is a, c, g, or t
tntcaatttctttctaaagcagnctctattgtcctagcatatgncctcaccaagttctttaaagnggcatttccaaccttagttcnt

SEQ ID NO: 80 - DNA, 87 bp, Artificial Sequence
  Synthetic Probe
  modified_base (2)..(2): DNP phosphoramidite base
  misc_feature (2)..(2): n is a, c, g, or t
  modified_base (23)..(23): DNP phosphoramidite base
  misc_feature (23)..(23): n is a, c, g, or t
  modified_base (44)..(44): DNP phosphoramidite base
  misc_feature (44)..(44): n is a, c, g, or t
  modified_base (65)..(65): DNP phosphoramidite base
  misc_feature (65)..(65): n is a, c, g, or t
  modified_base (86)..(86): DNP phosphoramidite base
  misc_feature (86)..(86): n is a, c, g, or t
tnccaaaaccacccttcctagcncctccctgtagaaaataccantgttgcacagttacatgtgtncccctgacacaaacgacactnt

SEQ ID NO: 81 - DNA, 87 bp, Artificial Sequence
  Synthetic Probe
  modified_base (2)..(2): DNP phosphoramidite base
  misc_feature (2)..(2): n is a, c, g, or t
  modified_base (23)..(23): DNP phosphoramidite base
  misc_feature (23)..(23): n is a, c, g, or t
  modified_base (44)..(44): DNP phosphoramidite base
  misc_feature (44)..(44): n is a, c, g, or t
  modified_base (65)..(65): DNP phosphoramidite base
  misc_feature (65)..(65): n is a, c, g, or t
  modified_base (86)..(86): DNP phosphoramidite base
  misc_feature (86)..(86): n is a, c, g, or t
tngctgtcccagccaattcaagnagtgaaggaagatgtaaccangacatacatatctccctttcntccctgttcaaactgtagatnt

SEQ ID NO: 82 - DNA, 87 bp, Artificial Sequence
  Synthetic Probe
  modified_base (2)..(2): DNP phosphoramidite base
  misc_feature (2)..(2): n is a, c, g, or t
  modified_base (23)..(23): DNP phosphoramidite base
  misc_feature (23)..(23): n is a, c, g, or t
  modified_base (44)..(44): DNP phosphoramidite base
  misc_feature (44)..(44): n is a, c, g, or t
  modified_base (65)..(65): DNP phosphoramidite base
  misc_feature (65)..(65): n is a, c, g, or t
  modified_base (86)..(86): DNP phosphoramidite base
  misc_feature (86)..(86): n is a, c, g, or t
tnaagcaagcatatagttctgtnagaaaagctttctaaaatganggtggaagatctcgtgcttcnttgttagctttttaagtcagnt

SEQ ID NO: 83 - DNA, 87 bp, Artificial Sequence
  Synthetic Probe
  modified_base (2)..(2): DNP phosphoramidite base
  misc_feature (2)..(2): n is a, c, g, or t
  modified_base (23)..(23): DNP phosphoramidite base
  misc_feature (23)..(23): n is a, c, g, or t
  modified_base (44)..(44): DNP phosphoramidite base
  misc_feature (44)..(44): n is a, c, g, or t
  modified_base (65)..(65): DNP phosphoramidite base
  misc_feature (65)..(65): n is a, c, g, or t
  modified_base (86)..(86): DNP phosphoramidite base
  misc_feature (86)..(86): n is a, c, g, or t
tnttacaagttgcaggacatgantgcacaatgtgaagaccaacnaaagtattttcaaagcatctntcagtgcactcaaaaggattnt

SEQ ID NO: 84 - DNA, 87 bp, Artificial Sequence
  Synthetic Probe
  modified_base (2)..(2): DNP phosphoramidite base
  misc_feature (2)..(2): n is a, c, g, or t
  modified_base (23)..(23): DNP phosphoramidite base
  misc_feature (23)..(23): n is a, c, g, or t
  modified_base (44)..(44): DNP phosphoramidite base
  misc_feature (44)..(44): n is a, c, g, or t
  modified_base (65)..(65): DNP phosphoramidite base
  misc_feature (65)..(65): n is a, c, g, or t
  modified_base (86)..(86): DNP phosphoramidite base
  misc_feature (86)..(86): n is a, c, g, or t
tnagaaaaggacactaacataanttcctggggagcacaaggtgncaaatcctaaagtatgttacnagagacagactgagcttcacnt

SEQ ID NO: 85 - DNA, 87 bp, Artificial Sequence
  Synthetic Probe
  modified_base (2)..(2): DNP phosphoramidite base
  misc_feature (2)..(2): n is a, c, g, or t
  modified_base (23)..(23): DNP phosphoramidite base
  misc_feature (23)..(23): n is a, c, g, or t
  modified_base (44)..(44): DNP phosphoramidite base
  misc_feature (44)..(44): n is a, c, g, or t
  modified_base (65)..(65): DNP phosphoramidite base
  misc_feature (65)..(65): n is a, c, g, or t
  modified_base (86)..(86): DNP phosphoramidite base
  misc_feature (86)..(86): n is a, c, g, or t
tntgcagagatgtatctatttanggcatttcctgcctgataacnctctgtcaccctttgttttcnacctatggaacagagaagaant

SEQ ID NO: 86 - DNA, 87 bp, Artificial Sequence
  Synthetic Probe
  modified_base (2)..(2): DNP phosphoramidite base
  misc_feature (2)..(2): n is a, c, g, or t
  modified_base (23)..(23): DNP phosphoramidite base
  misc_feature (23)..(23): n is a, c, g, or t
  modified_base (44)..(44): DNP phosphoramidite base
  misc_feature (44)..(44): n is a, c, g, or t
  modified_base (65)..(65): DNP phosphoramidite base
  misc_feature (65)..(65): n is a, c, g, or t
  modified_base (86)..(86): DNP phosphoramidite base
  misc_feature (86)..(86): n is a, c, g, or t
tnccacagcacagctggggcatngaaaatgggcttgttagacanagctgattcaactaggggggnaaaaaagaggagggaagaagnt

SEQ ID NO: 87 - DNA, 87 bp, Artificial Sequence
  Synthetic Probe
  modified_base (2)..(2): DNP phosphoramidite base
  misc_feature (2)..(2): n is a, c, g, or t
  modified_base (23)..(23): DNP phosphoramidite base
  misc_feature (23)..(23): n is a, c, g, or t
  modified_base (44)..(44): DNP phosphoramidite base
  misc_feature (44)..(44): n is a, c, g, or t
  modified_base (65)..(65): DNP phosphoramidite base
  misc_feature (65)..(65): n is a, c, g, or t
  modified_base (86)..(86): DNP phosphoramidite base
  misc_feature (86)..(86): n is a, c, g, or t
tnaaaaatgtcctgggaaagacncctaacagtttctaataatgntatcctactgacaatgcattngaggtggcggttctggttaant

SEQ ID NO: 88 - DNA, 87 bp, Artificial Sequence
  Synthetic Probe
  modified_base (2)..(2): DNP phosphoramidite base
  misc_feature (2)..(2): n is a, c, g, or t
  modified_base (23)..(23): DNP phosphoramidite base
  misc_feature (23)..(23): n is a, c, g, or t
  modified_base (44)..(44): DNP phosphoramidite base
  misc_feature (44)..(44): n is a, c, g, or t
  modified_base (65)..(65): DNP phosphoramidite base
  misc_feature (65)..(65): n is a, c, g, or t
  modified_base (86)..(86): DNP phosphoramidite base
  misc_feature (86)..(86): n is a, c, g, or t
tnaaaaagttatttctgatgggngtaggtaggtcacatgctatngagcggctcaacaccattganccctgcaaaagcgttatgacnt

SEQ ID NO: 89 - DNA, 87 bp, Artificial Sequence
  Synthetic Probe
  modified_base (2)..(2): DNP phosphoramidite base
  misc_feature (2)..(2): n is a, c, g, or t
  modified_base (23)..(23): DNP phosphoramidite base
  misc_feature (23)..(23): n is a, c, g, or t
  modified_base (44)..(44): DNP phosphoramidite base
  misc_feature (44)..(44): n is a, c, g, or t
  modified_base (65)..(65): DNP phosphoramidite base
  misc_feature (65)..(65): n is a, c, g, or t
  modified_base (86)..(86): DNP phosphoramidite base
  misc_feature (86)..(86): n is a, c, g, or t
tntggccacttggagtaacacancatggccagatcacgtggaanttctctgccgagagcgggganttgaagtaaggacctgctaant

SEQ ID NO: 90 - DNA, 87 bp, Artificial Sequence
  Synthetic Probe
  modified_base (2)..(2): DNP phosphoramidite base
  misc_feature (2)..(2): n is a, c, g, or t
  modified_base (23)..(23): DNP phosphoramidite base
  misc_feature (23)..(23): n is a, c, g, or t
  modified_base (44)..(44): DNP phosphoramidite base
  misc_feature (44)..(44): n is a, c, g, or t
  modified_base (65)..(65): DNP phosphoramidite base
  misc_feature (65)..(65): n is a, c, g, or t
  modified_base (86)..(86): DNP phosphoramidite base
  misc_feature (86)..(86): n is a, c, g, or t
tntacatatttctcctgttaggncatcatcttaaactcattccncttctttcctggcccgccgtntgacccagctctgaggattcnt

SEQ ID NO: 91 - DNA, 87 bp, Artificial Sequence
  Synthetic Probe
  modified_base (2)..(2): DNP phosphoramidite base
  misc_feature (2)..(2): n is a, c, g, or t
  modified_base (23)..(23): DNP phosphoramidite base
  misc_feature (23)..(23): n is a, c, g, or t
  modified_base (44)..(44): DNP phosphoramidite base
  misc_feature (44)..(44): n is a, c, g, or t
  modified_base (65)..(65): DNP phosphoramidite base
  misc_feature (65)..(65): n is a, c, g, or t
  modified_base (86)..(86): DNP phosphoramidite base
  misc_feature (86)..(86): n is a, c, g, or t
tntacgagaatgagttactctgnagcttccgccagccgcagccntcttggcatgattcttccctntgatagtgagcctgagccacnt

SEQ ID NO: 92 - DNA, 87 bp, Artificial Sequence
  Synthetic Probe
  modified_base (2)..(2): DNP phosphoramidite base
  misc_feature (2)..(2): n is a, c, g, or t
  modified_base (23)..(23): DNP phosphoramidite base
  misc_feature (23)..(23): n is a, c, g, or t
  modified_base (44)..(44): DNP phosphoramidite base
  misc_feature (44)..(44): n is a, c, g, or t
  modified_base (65)..(65): DNP phosphoramidite base
  misc_feature (65)..(65): n is a, c, g, or t
  modified_base (86)..(86): DNP phosphoramidite base
  misc_feature (86)..(86): n is a, c, g, or t
tnctgaaggaggcatcacagagncttacagtaatcattctccgntggccaggatcactcggcctncctggcttaaaggagcccatnt

SEQ ID NO: 93 - DNA, 87 bp, Artificial Sequence
  Synthetic Probe
  modified_base (2)..(2): DNP phosphoramidite base
  misc_feature (2)..(2): n is a, c, g, or t
  modified_base (23)..(23): DNP phosphoramidite base
  misc_feature (23)..(23): n is a, c, g, or t
  modified_base (44)..(44): DNP phosphoramidite base
  misc_feature (44)..(44): n is a, c, g, or t
  modified_base (65)..(65): DNP phosphoramidite base
  misc_feature (65)..(65): n is a, c, g, or t
  modified_base (86)..(86): DNP phosphoramidite base
  misc_feature (86)..(86): n is a, c, g, or t
tnttaaaaaaaatacagagtttncctccttctcctcaaaggtcntttctaagagctgaaaaacanaccaaaggatatggcatgacnt

SEQ ID NO: 94 - DNA, 87 bp, Artificial Sequence
  Synthetic Probe
  modified_base (2)..(2): DNP phosphoramidite base
  misc_feature (2)..(2): n is a, c, g, or t
  modified_base (23)..(23): DNP phosphoramidite base
  misc_feature (23)..(23): n is a, c, g, or t
  modified_base (44)..(44): DNP phosphoramidite base
  misc_feature (44)..(44): n is a, c, g, or t
  modified_base (65)..(65): DNP phosphoramidite base
  misc_feature (65)..(65): n is a, c, g, or t
  modified_base (86)..(86): DNP phosphoramidite base
  misc_feature (86)..(86): n is a, c, g, or t
tngacagtaagtcatgggtaaanataggtaaggcctaaaatcancattacgggaaacagtaaagntctgcagaatccatcgataant

SEQ ID NO: 95 - DNA, 87 bp, Artificial Sequence
  Synthetic Probe
  modified_base (2)..(2): DNP phosphoramidite base
  misc_feature (2)..(2): n is a, c, g, or t
  modified_base (23)..(23): DNP phosphoramidite base
  misc_feature (23)..(23): n is a, c, g, or t
  modified_base (44)..(44): DNP phosphoramidite base
  misc_feature (44)..(44): n is a, c, g, or t
  modified_base (65)..(65): DNP phosphoramidite base
  misc_feature (65)..(65): n is a, c, g, or t
  modified_base (86)..(86): DNP phosphoramidite base
  misc_feature (86)..(86): n is a, c, g, or t
tntaaggtacaggaatatcttgncctaaagcacctgttctatcnttccaaagagcagaagaactntggttttcaagtctgtttcant

SEQ ID NO: 96 - DNA, 87 bp, Artificial Sequence
  Synthetic Probe
  modified_base (2)..(2): DNP phosphoramidite base
  misc_feature (2)..(2): n is a, c, g, or t
  modified_base (23)..(23): DNP phosphoramidite base
  misc_feature (23)..(23): n is a, c, g, or t
  modified_base (44)..(44): DNP phosphoramidite base
  misc_feature (44)..(44): n is a, c, g, or t
  modified_base (65)..(65): DNP phosphoramidite base
  misc_feature (65)..(65): n is a, c, g, or t
  modified_base (86)..(86): DNP phosphoramidite base
  misc_feature (86)..(86): n is a, c, g, or t
tngagtagctgcaggctcgaccnacattgctcattctagcaggnaggaggacagctatttgctgncatagtaatttcggagtttcnt

SEQ ID NO: 97 - DNA, 87 bp, Artificial Sequence
  Synthetic Probe
  modified_base (2)..(2): DNP phosphoramidite base
  misc_feature (2)..(2): n is a, c, g, or t
  modified_base (23)..(23): DNP phosphoramidite base
  misc_feature (23)..(23): n is a, c, g, or t
  modified_base (44)..(44): DNP phosphoramidite base
  misc_feature (44)..(44): n is a, c, g, or t
  modified_base (65)..(65): DNP phosphoramidite base
  misc_feature (65)..(65): n is a, c, g, or t
  modified_base (86)..(86): DNP phosphoramidite base
  misc_feature (86)..(86): n is a, c, g, or t
tnggcaggatcacagagagcttnctgtcctctaaagtgatcaanagcaagagctagaaaagcctnacagagctggcgatttcagant

SEQ ID NO: 98 - DNA, 87 bp, Artificial Sequence
  Synthetic Probe
  modified_base (2)..(2): DNP phosphoramidite base
  misc_feature (2)..(2): n is a, c, g, or t
  modified_base (23)..(23): DNP phosphoramidite base
  misc_feature (23)..(23): n is a, c, g, or t
  modified_base (44)..(44): DNP phosphoramidite base
  misc_feature (44)..(44): n is a, c, g, or t
  modified_base (65)..(65): DNP phosphoramidite base
  misc_feature (65)..(65): n is a, c, g, or t
  modified_base (86)..(86): DNP phosphoramidite base
  misc_feature (86)..(86): n is a, c, g, or t
tnttttgcttatttacacaaggntcctacagcaagttactatcnaaggtagtaacaacagtaagnacagctgtgtgccatctcatnt

SEQ ID NO: 99 - DNA, 87 bp, Artificial Sequence
  Synthetic Probe
  modified_base (2)..(2): DNP phosphoramidite base
  misc_feature (2)..(2): n is a, c, g, or t
  modified_base (23)..(23): DNP phosphoramidite base
  misc_feature (23)..(23): n is a, c, g, or t
  modified_base (44)..(44): DNP phosphoramidite base
  misc_feature (44)..(44): n is a, c, g, or t
  modified_base (65)..(65): DNP phosphoramidite base
  misc_feature (65)..(65): n is a, c, g, or t
  modified_base (86)..(86): DNP phosphoramidite base
  misc_feature (86)..(86): n is a, c, g, or t
tntgtaaagcacatgcattaaanaccaaatctgaagtgtgtttntggccattctcagtccactgncaagtccatttggaaaaaaant

SEQ ID NO: 100 - DNA, 87 bp, Artificial Sequence
  Synthetic Probe
  modified_base (2)..(2): DNP phosphoramidite base
  misc_feature (2)..(2): n is a, c, g, or t
  modified_base (23)..(23): DNP phosphoramidite base
  misc_feature (23)..(23): n is a, c, g, or t
  modified_base (44)..(44): DNP phosphoramidite base
  misc_feature (44)..(44): n is a, c, g, or t
  modified_base (65)..(65): DNP phosphoramidite base
  misc_feature (65)..(65): n is a, c, g, or t
  modified_base (86)..(86): DNP phosphoramidite base
  misc_feature (86)..(86): n is a, c, g, or t
tntttatttctgttaataacctntccctgctaaagcaattcttncctctgggcatttatgctgantgaaacagtggtatgttaccnt

SEQ ID NO: 101 - DNA, 87 bp, Artificial Sequence
  Synthetic Probe
  modified_base (2)..(2): DNP phosphoramidite base
  misc_feature (2)..(2): n is a, c, g, or t
  modified_base (23)..(23): DNP phosphoramidite base
  misc_feature (23)..(23): n is a, c, g, or t
  modified_base (44)..(44): DNP phosphoramidite base
  misc_feature (44)..(44): n is a, c, g, or t
  modified_base (65)..(65): DNP phosphoramidite base
  misc_feature (65)..(65): n is a, c, g, or t
  modified_base (86)..(86): DNP phosphoramidite base
  misc_feature (86)..(86): n is a, c, g, or t
tntccttggaataaaactaaatnctgtgatgactacagatacancatgggtcactgctaaggtangccccagcttgggaacactgnt

SEQ ID NO: 102 - DNA, 87 bp, Artificial Sequence
  Synthetic Probe
  modified_base (2)..(2): DNP phosphoramidite base
  misc_feature (2)..(2): n is a, c, g, or t
  modified_base (23)..(23): DNP phosphoramidite base
  misc_feature (23)..(23): n is a, c, g, or t
  modified_base (44)..(44): DNP phosphoramidite base
  misc_feature (44)..(44): n is a, c, g, or t
  modified_base (65)..(65): DNP phosphoramidite base
  misc_feature (65)..(65): n is a, c, g, or t
  modified_base (86)..(86): DNP phosphoramidite base
  misc_feature (86)..(86): n is a, c, g, or t
tngattactggcacatgatacangtccggctctagtgtaaccanccattgtttacaatacccganggcaatttgaaactccacgant

SEQ ID NO: 103 - DNA, 87 bp, Artificial Sequence
  Synthetic Probe
  modified_base (2)..(2): DNP phosphoramidite base
  misc_feature (2)..(2): n is a, c, g, or t
  modified_base (23)..(23): DNP phosphoramidite base
  misc_feature (23)..(23): n is a, c, g, or t
  modified_base (44)..(44): DNP phosphoramidite base
  misc_feature (44)..(44): n is a, c, g, or t
  modified_base (65)..(65): DNP phosphoramidite base
  misc_feature (65)..(65): n is a, c, g, or t
  modified_base (86)..(86): DNP phosphoramidite base
  misc_feature (86)..(86): n is a, c, g, or t
tnatgcatctttttggctaacantttctacgctttccttctttnggtagctcacccacttctagnagttatgttcacactctgttnt

SEQ ID NO: 104 - DNA, 87 bp, Artificial Sequence
  Synthetic Probe
  modified_base (2)..(2): DNP phosphoramidite base
  misc_feature (2)..(2): n is a, c, g, or t
  modified_base (23)..(23): DNP phosphoramidite base
  misc_feature (23)..(23): n is a, c, g, or t
  modified_base (44)..(44): DNP phosphoramidite base
  misc_feature (44)..(44): n is a, c, g, or t
  modified_base (65)..(65): DNP phosphoramidite base
  misc_feature (65)..(65): n is a, c, g, or t
  modified_base (86)..(86): DNP phosphoramidite base
  misc_feature (86)..(86): n is a, c, g, or t
tnctgattacttgcttgcctctntttctttcccatctttacccntggtttttagctgcttaaatntgtcccattacatcctgttcnt

SEQ ID NO: 105 - DNA, 87 bp, Artificial Sequence
  Synthetic Probe
  modified_base (2)..(2): DNP phosphoramidite base
  misc_feature (2)..(2): n is a, c, g, or t
  modified_base (23)..(23): DNP phosphoramidite base
  misc_feature (23)..(23): n is a, c, g, or t
  modified_base (44)..(44): DNP phosphoramidite base
  misc_feature (44)..(44): n is a, c, g, or t
  modified_base (65)..(65): DNP phosphoramidite base
  misc_feature (65)..(65): n is a, c, g, or t
  modified_base (86)..(86): DNP phosphoramidite base
  misc_feature (86)..(86): n is a, c, g, or t
tngattaatcatgctaacagacntctgcttgaatggtaaagacnaggcaaaggaagaccctgtantcaaacaactgtactggacant

SEQ ID NO: 106 - DNA, 87 bp, Artificial Sequence
  Synthetic Probe
  modified_base (2)..(2): DNP phosphoramidite base
  misc_feature (2)..(2): n is a, c, g, or t
  modified_base (23)..(23): DNP phosphoramidite base
  misc_feature (23)..(23): n is a, c, g, or t
  modified_base (44)..(44): DNP phosphoramidite base
  misc_feature (44)..(44): n is a, c, g, or t
  modified_base (65)..(65): DNP phosphoramidite base
  misc_feature (65)..(65): n is a, c, g, or t
  modified_base (86)..(86): DNP phosphoramidite base
  misc_feature (86)..(86): n is a, c, g, or t
tntcagatgccagcatagatcantttacatttgcctacaaaganctggtaagctatcgcatgccnacacagcttagtgtaacaggnt

SEQ ID NO: 107 - DNA, 87 bp, Artificial Sequence
  Synthetic Probe
  modified_base (2)..(2): DNP phosphoramidite base
  misc_feature (2)..(2): n is a, c, g, or t
  modified_base (23)..(23): DNP phosphoramidite base
  misc_feature (23)..(23): n is a, c, g, or t
  modified_base (44)..(44): DNP phosphoramidite base
  misc_feature (44)..(44): n is a, c, g, or t
  modified_base (65)..(65): DNP phosphoramidite base
  misc_feature (65)..(65): n is a, c, g, or t
  modified_base (86)..(86): DNP phosphoramidite base
  misc_feature (86)..(86): n is a, c, g, or t
tnttcaccctactcaatgcctgngttttcttttctccctttacnctgataatgagcctgggcttngctgtgcagagttcaaggtgnt

SEQ ID NO: 108 - DNA, 87 bp, Artificial Sequence
  Synthetic Probe
  modified_base (2)..(2): DNP phosphoramidite base
  misc_feature (2)..(2): n is a, c, g, or t
  modified_base (23)..(23): DNP phosphoramidite base
  misc_feature (23)..(23): n is a, c, g, or t
  modified_base (44)..(44): DNP phosphoramidite base
  misc_feature (44)..(44): n is a, c, g, or t
  modified_base (65)..(65): DNP phosphoramidite base
  misc_feature (65)..(65): n is a, c, g, or t
  modified_base (86)..(86): DNP phosphoramidite base
  misc_feature (86)..(86): n is a, c, g, or t
tnacattgcagagtttgcagtancaggggcttacatagctcctnccagggcacagtcttgctccncctcccttcgataactcttcnt

SEQ ID NO: 109 - DNA, 87 bp, Artificial Sequence
  Synthetic Probe
  modified_base (2)..(2): DNP phosphoramidite base
  misc_feature (2)..(2): n is a, c, g, or t
  modified_base (23)..(23): DNP phosphoramidite base
  misc_feature (23)..(23): n is a, c, g, or t
  modified_base (44)..(44): DNP phosphoramidite base
  misc_feature (44)..(44): n is a, c, g, or t
  modified_base (65)..(65): DNP phosphoramidite base
  misc_feature (65)..(65): n is a, c, g, or t
  modified_base (86)..(86): DNP phosphoramidite base
  misc_feature (86)..(86): n is a, c, g, or t
tnaagcctcctgcccaaaaggcnttctgtggtggaagctgcaanggttcctgtagacctggtggnccactgacataggaggcgagnt

SEQ ID NO: 110 - DNA, 87 bp, Artificial Sequence
  Synthetic Probe
  modified_base (2)..(2): DNP phosphoramidite base
  misc_feature (2)..(2): n is a, c, g, or t
  modified_base (23)..(23): DNP phosphoramidite base
  misc_feature (23)..(23): n is a, c, g, or t
  modified_base (44)..(44): DNP phosphoramidite base
  misc_feature (44)..(44): n is a, c, g, or t
  modified_base (65)..(65): DNP phosphoramidite base
  misc_feature (65)..(65): n is a, c, g, or t
  modified_base (86)..(86): DNP phosphoramidite base
  misc_feature (86)..(86): n is a, c, g, or t
tngcttaggtggaggaagcacgngcgtgttgcaagaggatcatntgggtagggaagcctggggcnataatccagtgggtgatgagnt

SEQ ID NO: 111 - DNA, 87 bp, Artificial Sequence
  Synthetic Probe
  modified_base (2)..(2): DNP phosphoramidite base
  misc_feature (2)..(2): n is a, c, g, or t
  modified_base (23)..(23): DNP phosphoramidite base
  misc_feature (23)..(23): n is a, c, g, or t
  modified_base (44)..(44): DNP phosphoramidite base
  misc_feature (44)..(44): n is a, c, g, or t
  modified_base (65)..(65): DNP phosphoramidite base
  misc_feature (65)..(65): n is a, c, g, or t
  modified_base (86)..(86): DNP phosphoramidite base
  misc_feature (86)..(86): n is a, c, g, or t
tncatgtaaatgacaacataatnctgaccctttcttctacttcntccaaacccatctttgggacnttctttcctttggcctcattnt

SEQ ID NO: 112 - DNA, 87 bp, Artificial Sequence
  Synthetic Probe
  modified_base (2)..(2): DNP phosphoramidite base
  misc_feature (2)..(2): n is a, c, g, or t
  modified_base (23)..(23): DNP phosphoramidite base
  misc_feature (23)..(23): n is a, c, g, or t
  modified_base (44)..(44): DNP phosphoramidite base
  misc_feature (44)..(44): n is a, c, g, or t
  modified_base (65)..(65): DNP phosphoramidite base
  misc_feature (65)..(65): n is a, c, g, or t
  modified_base (86)..(86): DNP phosphoramidite base
  misc_feature (86)..(86): n is a, c, g, or t
tntggctttattttgcttggcancagttccaactgctatccctnttggcccgtgaacattaacangcattgcatccacggctaaant

SEQ ID NO: 113 - DNA, 87 bp, Artificial Sequence
  Synthetic Probe
  modified_base (2)..(2): DNP phosphoramidite base
  misc_feature (2)..(2): n is a, c, g, or t
  modified_base (23)..(23): DNP phosphoramidite base
  misc_feature (23)..(23): n is a, c, g, or t
  modified_base (44)..(44): DNP phosphoramidite base
  misc_feature (44)..(44): n is a, c, g, or t
  modified_base (65)..(65): DNP phosphoramidite base
  misc_feature (65)..(65): n is a, c, g, or t
  modified_base (86)..(86): DNP phosphoramidite base
  misc_feature (86)..(86): n is a, c, g, or t
tnaatggagtaatggatcacacncaccataagccacagtataanttccagttcctcaatcttganggctatttccctcctccttcnt

SEQ ID NO: 114 - DNA, 87 bp, Artificial Sequence
  Synthetic Probe
  modified_base (2)..(2): DNP phosphoramidite base
  misc_feature (2)..(2): n is a, c, g, or t
  modified_base (23)..(23): DNP phosphoramidite base
  misc_feature (23)..(23): n is a, c, g, or t
  modified_base (44)..(44): DNP phosphoramidite base
  misc_feature (44)..(44): n is a, c, g, or t
  modified_base (65)..(65): DNP phosphoramidite base
  misc_feature (65)..(65): n is a, c, g, or t
  modified_base (86)..(86): DNP phosphoramidite base
  misc_feature (86)..(86): n is a, c, g, or t
tnctgcctcccccccagatggcngccgtctaaccctgagtgtcntcaaaatgaaccacagtacanccctttgagttcccaagattnt

SEQ ID NO: 115 - DNA, 87 bp, Artificial Sequence
  Synthetic Probe
  modified_base (2)..(2): DNP phosphoramidite base
  misc_feature (2)..(2): n is a, c, g, or t
  modified_base (23)..(23): DNP phosphoramidite base
  misc_feature (23)..(23): n is a, c, g, or t
  modified_base (44)..(44): DNP phosphoramidite base
  misc_feature (44)..(44): n is a, c, g, or t
  modified_base (65)..(65): DNP phosphoramidite base
  misc_feature (65)..(65): n is a, c, g, or t
  modified_base (86)..(86): DNP phosphoramidite base
  misc_feature (86)..(86): n is a, c, g, or t
tnacagcacctgaaaatcaagtnaacaactttcagacgaaattntggggtggggaggcaacaaanggaaatcagcgtgatgggaant

SEQ ID NO: 116 - DNA, 87 bp, Artificial Sequence
  Synthetic Probe
  modified_base (2)..(2): DNP phosphoramidite base
  misc_feature (2)..(2): n is a, c, g, or t
  modified_base (23)..(23): DNP phosphoramidite base
  misc_feature (23)..(23): n is a, c, g, or t
  modified_base (44)..(44): DNP phosphoramidite base
  misc_feature (44)..(44): n is a, c, g, or t
  modified_base (65)..(65): DNP phosphoramidite base
  misc_feature (65)..(65): n is a, c, g, or t
  modified_base (86)..(86): DNP phosphoramidite base
  misc_feature (86)..(86): n is a, c, g, or t
tngttgaaaagctactgatgtcnaaattgccacaaacattctgnctagttcattagtgaaaaggntgggggggggtgtcaaaaccnt

SEQ ID NO: 117 - DNA, 87 bp, Artificial Sequence
  Synthetic Probe
  modified_base (2)..(2): DNP phosphoramidite base
  misc_feature (2)..(2): n is a, c, g, or t
  modified_base (23)..(23): DNP phosphoramidite base
  misc_feature (23)..(23): n is a, c, g, or t
  modified_base (44)..(44): DNP phosphoramidite base
  misc_feature (44)..(44): n is a, c, g, or t
  modified_base (65)..(65): DNP phosphoramidite base
  misc_feature (65)..(65): n is a, c, g, or t
  modified_base (86)..(86): DNP phosphoramidite base
  misc_feature (86)..(86): n is a, c, g, or t
tnaaattctagcatgtgtctccncccagtgttatctacaggttntccctcaaaataaagatcctntctcaaagaacagaggcacant

SEQ ID NO: 118 - DNA, 87 bp, Artificial Sequence
  Synthetic Probe
  modified_base (2)..(2): DNP phosphoramidite base
  misc_feature (2)..(2): n is a, c, g, or t
  modified_base (23)..(23): DNP phosphoramidite base
  misc_feature (23)..(23): n is a, c, g, or t
  modified_base (44)..(44): DNP phosphoramidite base
  misc_feature (44)..(44): n is a, c, g, or t
  modified_base (65)..(65): DNP phosphoramidite base
  misc_feature (65)..(65): n is a, c, g, or t
  modified_base (86)..(86): DNP phosphoramidite base
  misc_feature (86)..(86): n is a, c, g, or t
tntcttaaaaaccagtcactttngatgcttgcgatggcataaantgaaggatttatgctggttanatgtcctggtttggaaaggant

SEQ ID NO: 119 - DNA, 87 bp, Artificial Sequence
  Synthetic Probe
  modified_base (2)..(2): DNP phosphoramidite base
  misc_feature (2)..(2): n is a, c, g, or t
  modified_base (23)..(23): DNP phosphoramidite base
  misc_feature (23)..(23): n is a, c, g, or t
  modified_base (44)..(44): DNP phosphoramidite base
  misc_feature (44)..(44): n is a, c, g, or t
  modified_base (65)..(65): DNP phosphoramidite base
  misc_feature (65)..(65): n is a, c, g, or t
  modified_base (86)..(86): DNP phosphoramidite base
  misc_feature (86)..(86): n is a, c, g, or t
tnagcacctcagcaaactaggtnaagtctgtaattgggaattcntggaaatgagggaaaggcagncgagcattactcagaggtcant

SEQ ID NO: 120 - DNA, 87 bp, Artificial Sequence
  Synthetic Probe
  modified_base (2)..(2): DNP phosphoramidite base
  misc_feature (2)..(2): n is a, c, g, or t
  modified_base (23)..(23): DNP phosphoramidite base
  misc_feature (23)..(23): n is a, c, g, or t
  modified_base (44)..(44): DNP phosphoramidite base
  misc_feature (44)..(44): n is a, c, g, or t
  modified_base (65)..(65): DNP phosphoramidite base
  misc_feature (65)..(65): n is a, c, g, or t
  modified_base (86)..(86): DNP phosphoramidite base
  misc_feature (86)..(86): n is a, c, g, or t
tnctggggaagaggccttggtgnaattggcgaatgtttttcagntctccgctgtgacggttcctnaatcctagagaactgtttacnt

SEQ ID NO: 121 - DNA, 87 bp, Artificial Sequence
  Synthetic Probe
  modified_base (2)..(2): DNP phosphoramidite base
  misc_feature (2)..(2): n is a, c, g, or t
  modified_base (23)..(23): DNP phosphoramidite base
  misc_feature (23)..(23): n is a, c, g, or t
  modified_base (44)..(44): DNP phosphoramidite base
  misc_feature (44)..(44): n is a, c, g, or t
  modified_base (65)..(65): DNP phosphoramidite base
  misc_feature (65)..(65): n is a, c, g, or t
  modified_base (86)..(86): DNP phosphoramidite base
  misc_feature (86)..(86): n is a, c, g, or t
tnagatttgaatcaaagctacangacagttcagcgtcgcccacnatccaccttacattcctaagnatgtgcatgcatacacacgant

SEQ ID NO: 122 - DNA, 87 bp, Artificial Sequence
  Synthetic Probe
  modified_base (2)..(2): DNP phosphoramidite base
  misc_feature (2)..(2): n is a, c, g, or t
  modified_base (23)..(23): DNP phosphoramidite base
  misc_feature (23)..(23): n is a, c, g, or t
  modified_base (44)..(44): DNP phosphoramidite base
  misc_feature (44)..(44): n is a, c, g, or t
  modified_base (65)..(65): DNP phosphoramidite base
  misc_feature (65)..(65): n is a, c, g, or t
  modified_base (86)..(86): DNP phosphoramidite base
  misc_feature (86)..(86): n is a, c, g, or t
tncccgccgccaatctcagcagnacagccccgaagagcagttcnagcagatgccctggaaagttnaatccttggtagaagcctggnt

SEQ ID NO: 123 - DNA, 87 bp, Artificial Sequence
  Synthetic Probe
  modified_base (2)..(2): DNP phosphoramidite base
  misc_feature (2)..(2): n is a, c, g, or t
  modified_base (23)..(23): DNP phosphoramidite base
  misc_feature (23)..(23): n is a, c, g, or t
  modified_base (44)..(44): DNP phosphoramidite base
  misc_feature (44)..(44): n is a, c, g, or t
  modified_base (65)..(65): DNP phosphoramidite base
  misc_feature (65)..(65): n is a, c, g, or t
  modified_base (86)..(86): DNP phosphoramidite base
  misc_feature (86)..(86): n is a, c, g, or t
tnatctccagtcattgggatccnaaacattgttcattctgttcnctcccttagcctgctggttgngcggttaaggcggctgagtgnt

SEQ ID NO: 124 - DNA, 87 bp, Artificial Sequence
  Synthetic Probe
  modified_base (2)..(2): DNP phosphoramidite base
  misc_feature (2)..(2): n is a, c, g, or t
  modified_base (23)..(23): DNP phosphoramidite base
  misc_feature (23)..(23): n is a, c, g, or t
  modified_base (44)..(44): DNP phosphoramidite base
  misc_feature (44)..(44): n is a, c, g, or t
  modified_base (65)..(65): DNP phosphoramidite base
  misc_feature (65)..(65): n is a, c, g, or t
  modified_base (86)..(86): DNP phosphoramidite base
  misc_feature (86)..(86): n is a, c, g, or t
tngtgagcaggagatagaggagnactttctcctgacccccaganggctcacctgcaagacagganaggaccaggaaaagagtggcnt

SEQ ID NO: 125 - DNA, 87 bp, Artificial Sequence
  Synthetic Probe
  modified_base (2)..(2): DNP phosphoramidite base
  misc_feature (2)..(2): n is a, c, g, or t
  modified_base (23)..(23): DNP phosphoramidite base
  misc_feature (23)..(23): n is a, c, g, or t
  modified_base (44)..(44): DNP phosphoramidite base
  misc_feature (44)..(44): n is a, c, g, or t
  modified_base (65)..(65): DNP phosphoramidite base
  misc_feature (65)..(65): n is a, c, g, or t
  modified_base (86)..(86): DNP phosphoramidite base
  misc_feature (86)..(86): n is a, c, g, or t
tnaacctggacatcttcaatgtntaacactgagtgatgagctgnaggaaattccggctctaaacnttatagcgtaaattaactcgnt

SEQ ID NO: 126 - DNA, 87 bp, Artificial Sequence
  Synthetic Probe
  modified_base (2)..(2): DNP phosphoramidite base
  misc_feature (2)..(2): n is a, c, g, or t
  modified_base (23)..(23): DNP phosphoramidite base
  misc_feature (23)..(23): n is a, c, g, or t
  modified_base (44)..(44): DNP phosphoramidite base
  misc_feature (44)..(44): n is a, c, g, or t
  modified_base (65)..(65): DNP phosphoramidite base
  misc_feature (65)..(65): n is a, c, g, or t
  modified_base (86)..(86): DNP phosphoramidite base
  misc_feature (86)..(86): n is a, c, g, or t
tntaagatgtgccctattagtangggaaacaactgcaggaaatncaaggctgtttctttggctgnaaaaatgcaccaatccaatant

SEQ ID NO: 127 - DNA, 87 bp, Artificial Sequence
  Synthetic Probe
  modified_base (2)..(2): DNP phosphoramidite base
  misc_feature (2)..(2): n is a, c, g, or t
  modified_base (23)..(23): DNP phosphoramidite base
  misc_feature (23)..(23): n is a, c, g, or t
  modified_base (44)..(44): DNP phosphoramidite base
  misc_feature (44)..(44): n is a, c, g, or t
  modified_base (65)..(65): DNP phosphoramidite base
  misc_feature (65)..(65): n is a, c, g, or t
  modified_base (86)..(86): DNP phosphoramidite base
  misc_feature (86)..(86): n is a, c, g, or t
tntatggtctttagccagtcttnagaacttcacagtccacactnccttatctaggaccacaagtnaggccttgcggagcctttccnt

SEQ ID NO: 128 - DNA, 87 bp, Artificial Sequence
  Synthetic Probe
  modified_base (2)..(2): DNP phosphoramidite base
  misc_feature (2)..(2): n is a, c, g, or t
  modified_base (23)..(23): DNP phosphoramidite base
  misc_feature (23)..(23): n is a, c, g, or t
  modified_base (44)..(44): DNP phosphoramidite base
  misc_feature (44)..(44): n is a, c, g, or t
  modified_base (65)..(65): DNP phosphoramidite base
  misc_feature (65)..(65): n is a, c, g, or t
  modified_base (86)..(86): DNP phosphoramidite base
  misc_feature (86)..(86): n is a, c, g, or t
tngatctgaccttccaccagtcntcccctcatcatttcactcancacccccatccatgccccttncatttcctgcctctgtaattnt

SEQ ID NO: 129 - DNA, 87 bp, Artificial Sequence
  Synthetic Probe
  modified_base (2)..(2): DNP phosphoramidite base
  misc_feature (2)..(2): n is a, c, g, or t
  modified_base (23)..(23): DNP phosphoramidite base
  misc_feature (23)..(23): n is a, c, g, or t
  modified_base (44)..(44): DNP phosphoramidite base
  misc_feature (44)..(44): n is a, c, g, or t
  modified_base (65)..(65): DNP phosphoramidite base
  misc_feature (65)..(65): n is a, c, g, or t
  modified_base (86)..(86): DNP phosphoramidite base
  misc_feature (86)..(86): n is a, c, g, or t
tntcctacctgtccttccaggcnctcttctttcatgaggtcccnacagcacttttctccgcacanccttgatgacacactatttgnt

SEQ ID NO: 130 - DNA, 87 bp, Artificial Sequence
  Synthetic Probe
  modified_base (2)..(2): DNP phosphoramidite base
  misc_feature (2)..(2): n is a, c, g, or t
  modified_base (23)..(23): DNP phosphoramidite base
  misc_feature (23)..(23): n is a, c, g, or t
  modified_base (44)..(44): DNP phosphoramidite base
  misc_feature (44)..(44): n is a, c, g, or t
  modified_base (65)..(65): DNP phosphoramidite base
  misc_feature (65)..(65): n is a, c, g, or t
  modified_base (86)..(86): DNP phosphoramidite base
  misc_feature (86)..(86): n is a, c, g, or t
tntccatcaggatgaaaatctgnaacaattccatgttctctgcntcacatactcttctcagacangctagggcatttccttccctnt

SEQ ID NO: 131 - DNA, 87 bp, Artificial Sequence
  Synthetic Probe
  modified_base (2)..(2): DNP phosphoramidite base
  misc_feature (2)..(2): n is a, c, g, or t
  modified_base (23)..(23): DNP phosphoramidite base
  misc_feature (23)..(23): n is a, c, g, or t
  modified_base (44)..(44): DNP phosphoramidite base
  misc_feature (44)..(44): n is a, c, g, or t
  modified_base (65)..(65): DNP phosphoramidite base
  misc_feature (65)..(65): n is a, c, g, or t
  modified_base (86)..(86): DNP phosphoramidite base
  misc_feature (86)..(86): n is a, c, g, or t
tntgcttgtgtaatagatatttngaagctcatggcagtgacagntagtctcataagtcagagttntgtagtttagaattggctggnt

SEQ ID NO: 132 - DNA, 87 bp, Artificial Sequence
  Synthetic Probe
  modified_base (2)..(2): DNP phosphoramidite base
  misc_feature (2)..(2): n is a, c, g, or t
  modified_base (23)..(23): DNP phosphoramidite base
  misc_feature (23)..(23): n is a, c, g, or t
  modified_base (44)..(44): DNP phosphoramidite base
  misc_feature (44)..(44): n is a, c, g, or t
  modified_base (65)..(65): DNP phosphoramidite base
  misc_feature (65)..(65): n is a, c, g, or t
  modified_base (86)..(86): DNP phosphoramidite base
  misc_feature (86)..(86): n is a, c, g, or t
tncccacatgtgtgaagatctangagattgggggcatctgagcntctattcccagtggggatcangaaaagcaatcaaggtctagnt

SEQ ID NO: 133 - DNA, 87 bp, Artificial Sequence
  Synthetic Probe
  modified_base (2)..(2): DNP phosphoramidite base
  misc_feature (2)..(2): n is a, c, g, or t
  modified_base (23)..(23): DNP phosphoramidite base
  misc_feature (23)..(23): n is a, c, g, or t
  modified_base (44)..(44): DNP phosphoramidite base
  misc_feature (44)..(44): n is a, c, g, or t
  modified_base (65)..(65): DNP phosphoramidite base
  misc_feature (65)..(65): n is a, c, g, or t
  modified_base (86)..(86): DNP phosphoramidite base
  misc_feature (86)..(86): n is a, c, g, or t
tnagacatcgcctattgaggtcnaaagccaaggcgtgtttgcanctgatgtctacttcctcttgnccacctgcctccccacttcant

SEQ ID NO: 134 - DNA, 87 bp, Artificial Sequence
  Synthetic Probe
  modified_base (2)..(2): DNP phosphoramidite base
  misc_feature (2)..(2): n is a, c, g, or t
  modified_base (23)..(23): DNP phosphoramidite base
  misc_feature (23)..(23): n is a, c, g, or t
  modified_base (44)..(44): DNP phosphoramidite base
  misc_feature (44)..(44): n is a, c, g, or t
  modified_base (65)..(65): DNP phosphoramidite base
  misc_feature (65)..(65): n is a, c, g, or t
  modified_base (86)..(86): DNP phosphoramidite base
  misc_feature (86)..(86): n is a, c, g, or t
tntaaggggaagcagatcatttntgaagtgaatagatattagcncagaaatgacttggagacagngagagatttgtgggtaatagnt

SEQ ID NO: 135 - DNA, 87 bp, Artificial Sequence
  Synthetic Probe
  modified_base (2)..(2): DNP phosphoramidite base
  misc_feature (2)..(2): n is a, c, g, or t
  modified_base (23)..(23): DNP phosphoramidite base
  misc_feature (23)..(23): n is a, c, g, or t
  modified_base (44)..(44): DNP phosphoramidite base
  misc_feature (44)..(44): n is a, c, g, or t
  modified_base (65)..(65): DNP phosphoramidite base
  misc_feature (65)..(65): n is a, c, g, or t
  modified_base (86)..(86): DNP phosphoramidite base
  misc_feature (86)..(86): n is a, c, g, or t
tnatccctctccagggactgatnacaattcgtcaggtcagatcnctctcttgtatgggagtttgntgtcatcctttgagactccant

SEQ ID NO: 136 - DNA, 87 bp, Artificial Sequence
  Synthetic Probe
  modified_base (2)..(2): DNP phosphoramidite base
  misc_feature (2)..(2): n is a, c, g, or t
  modified_base (23)..(23): DNP phosphoramidite base
  misc_feature (23)..(23): n is a, c, g, or t
  modified_base (44)..(44): DNP phosphoramidite base
  misc_feature (44)..(44): n is a, c, g, or t
  modified_base (65)..(65): DNP phosphoramidite base
  misc_feature (65)..(65): n is a, c, g, or t
  modified_base (86)..(86): DNP phosphoramidite base
  misc_feature (86)..(86): n is a, c, g, or t
tnatagcaaaaccaaaggcctantagccaactataacaaaatantaggagggagtggggacaaanccaccaatagctacgagaccnt

SEQ ID NO: 137 - DNA, 87 bp, Artificial Sequence
  Synthetic Probe
  modified_base (2)..(2): DNP phosphoramidite base
  misc_feature (2)..(2): n is a, c, g, or t
  modified_base (23)..(23): DNP phosphoramidite base
  misc_feature (23)..(23): n is a, c, g, or t
  modified_base (44)..(44): DNP phosphoramidite base
  misc_feature (44)..(44): n is a, c, g, or t
  modified_base (65)..(65): DNP phosphoramidite base
  misc_feature (65)..(65): n is a, c, g, or t
  modified_base (86)..(86): DNP phosphoramidite base
  misc_feature (86)..(86): n is a, c, g, or t
tnaggagctttgcgcttctaagnagtggattcgtgcaatgggtnaagaggggagttttgacaggnacttgtggatggaatggttant

SEQ ID NO: 138 - DNA, 87 bp, Artificial Sequence
  Synthetic Probe
  modified_base (2)..(2): DNP phosphoramidite base
  misc_feature (2)..(2): n is a, c, g, or t
  modified_base (23)..(23): DNP phosphoramidite base
  misc_feature (23)..(23): n is a, c, g, or t
  modified_base (44)..(44): DNP phosphoramidite base
  misc_feature (44)..(44): n is a, c, g, or t
  modified_base (65)..(65): DNP phosphoramidite base
  misc_feature (65)..(65): n is a, c, g, or t
  modified_base (86)..(86): DNP phosphoramidite base
  misc_feature (86)..(86): n is a, c, g, or t
tngtttgaggactaataaccctnggaaacacagacctcagagcntaactgagagtgtgttcctgnagtagactatacaagacacant

SEQ ID NO: 139 - DNA, 87 bp, Artificial Sequence
  Synthetic Probe
  modified_base (2)..(2): DNP phosphoramidite base
  misc_feature (2)..(2): n is a, c, g, or t
  modified_base (23)..(23): DNP phosphoramidite base
  misc_feature (23)..(23): n is a, c, g, or t
  modified_base (44)..(44): DNP phosphoramidite base
  misc_feature (44)..(44): n is a, c, g, or t
  modified_base (65)..(65): DNP phosphoramidite base
  misc_feature (65)..(65): n is a, c, g, or t
  modified_base (86)..(86): DNP phosphoramidite base
  misc_feature (86)..(86): n is a, c, g, or t
tnattttcatttttcccataganctgaagcagtttggggcccantaaactctcggatctaactantcccaaactcctttcccaaant

SEQ ID NO: 140 - DNA, 87 bp, Artificial Sequence
  Synthetic Probe
  modified_base (2)..(2): DNP phosphoramidite base
  misc_feature (2)..(2): n is a, c, g, or t
  modified_base (23)..(23): DNP phosphoramidite base
  misc_feature (23)..(23): n is a, c, g, or t
  modified_base (44)..(44): DNP phosphoramidite base
  misc_feature (44)..(44): n is a, c, g, or t
  modified_base (65)..(65): DNP phosphoramidite base
  misc_feature (65)..(65): n is a, c, g, or t
  modified_base (86)..(86): DNP phosphoramidite base
  misc_feature (86)..(86): n is a, c, g, or t
tnaccactatccttactacttanctaaaccttactactactggnaacagtagtcctcactattcnacacaggtggcggtcaagaant

SEQ ID NO: 141 - DNA, 87 bp, Artificial Sequence
  Synthetic Probe
  modified_base (2)..(2): DNP phosphoramidite base
  misc_feature (2)..(2): n is a, c, g, or t
  modified_base (23)..(23): DNP phosphoramidite base
  misc_feature (23)..(23): n is a, c, g, or t
  modified_base (44)..(44): DNP phosphoramidite base
  misc_feature (44)..(44): n is a, c, g, or t
  modified_base (65)..(65): DNP phosphoramidite base
  misc_feature (65)..(65): n is a, c, g, or t
  modified_base (86)..(86): DNP phosphoramidite base
  misc_feature (86)..(86): n is a, c, g, or t
tntgctgcctggagtctctcttngctctttaggagttgtttctnttcttagggcaaacagagttncactctgcttcactgcagccnt

SEQ ID NO: 142 - DNA, 87 bp, Artificial Sequence
  Synthetic Probe
  modified_base (2)..(2): DNP phosphoramidite base
  misc_feature (2)..(2): n is a, c, g, or t
  modified_base (23)..(23): DNP phosphoramidite base
  misc_feature (23)..(23): n is a, c, g, or t
  modified_base (44)..(44): DNP phosphoramidite base
  misc_feature (44)..(44): n is a, c, g, or t
  modified_base (65)..(65): DNP phosphoramidite base
  misc_feature (65)..(65): n is a, c, g, or t
  modified_base (86)..(86): DNP phosphoramidite base
  misc_feature (86)..(86): n is a, c, g, or t
tnattctgttccaaacttaacanaccttgacccagaatttgctntgaataagagtaggtcagatngtccatgcctggatccatcant

SEQ ID NO: 143 - DNA, 87 bp, Artificial Sequence
  Synthetic Probe
  modified_base (2)..(2): DNP phosphoramidite base
  misc_feature (2)..(2): n is a, c, g, or t
  modified_base (23)..(23): DNP phosphoramidite base
  misc_feature (23)..(23): n is a, c, g, or t
  modified_base (44)..(44): DNP phosphoramidite base
  misc_feature (44)..(44): n is a, c, g, or t
  modified_base (65)..(65): DNP phosphoramidite base
  misc_feature (65)..(65): n is a, c, g, or t
  modified_base (86)..(86): DNP phosphoramidite base
  misc_feature (86)..(86): n is a, c, g, or t
tngtcaaattagtttttcttttncaagcaaggcaatcccacccntccctctgcttaacaaaacanagggcttgaaacaacaaccant

SEQ ID NO: 144 - DNA, 87 bp, Artificial Sequence
  Synthetic Probe
  modified_base (2)..(2): DNP phosphoramidite base
  misc_feature (2)..(2): n is a, c, g, or t
  modified_base (23)..(23): DNP phosphoramidite base
  misc_feature (23)..(23): n is a, c, g, or t
  modified_base (44)..(44): DNP phosphoramidite base
  misc_feature (44)..(44): n is a, c, g, or t
  modified_base (65)..(65): DNP phosphoramidite base
  misc_feature (65)..(65): n is a, c, g, or t
  modified_base (86)..(86): DNP phosphoramidite base
  misc_feature (86)..(86): n is a, c, g, or t
tnatttctcagcatcctgtgganaagcaaataactggatttacncaatgcatccaggttggtcanggcactggagaaacaataaant

SEQ ID NO: 145 - DNA, 87 bp, Artificial Sequence
  Synthetic Probe
  modified_base (2)..(2): DNP phosphoramidite base
  misc_feature (2)..(2): n is a, c, g, or t
  modified_base (23)..(23): DNP phosphoramidite base
  misc_feature (23)..(23): n is a, c, g, or t
  modified_base (44)..(44): DNP phosphoramidite base
  misc_feature (44)..(44): n is a, c, g, or t
  modified_base (65)..(65): DNP phosphoramidite base
  misc_feature (65)..(65): n is a, c, g, or t
  modified_base (86)..(86): DNP phosphoramidite base
  misc_feature (86)..(86): n is a, c, g, or t
tnagaaatggagaaggaagtctngtatctcaaggaaaatcaaantttcaccccaagcctgacgtnttgtcatcaaatgggaagaant

SEQ ID NO: 146 - DNA, 87 bp, Artificial Sequence
  Synthetic Probe
  modified_base (2)..(2): DNP phosphoramidite base
  misc_feature (2)..(2): n is a, c, g, or t
  modified_base (23)..(23): DNP phosphoramidite base
  misc_feature (23)..(23): n is a, c, g, or t
  modified_base (44)..(44): DNP phosphoramidite base
  misc_feature (44)..(44): n is a, c, g, or t
  modified_base (65)..(65): DNP phosphoramidite base
  misc_feature (65)..(65): n is a, c, g, or t
  modified_base (86)..(86): DNP phosphoramidite base
  misc_feature (86)..(86): n is a, c, g, or t
tntccccaataagactcatgctntacagaaatatccacggaagnaggcatctcctgcccaccaanatatctatatgcttctccacnt

SEQ ID NO: 147 - DNA, 87 bp, Artificial Sequence
  Synthetic Probe
  modified_base (2)..(2): DNP phosphoramidite base
  misc_feature (2)..(2): n is a, c, g, or t
  modified_base (23)..(23): DNP phosphoramidite base
  misc_feature (23)..(23): n is a, c, g, or t
  modified_base (44)..(44): DNP phosphoramidite base
  misc_feature (44)..(44): n is a, c, g, or t
  modified_base (65)..(65): DNP phosphoramidite base
  misc_feature (65)..(65): n is a, c, g, or t
  modified_base (86)..(86): DNP phosphoramidite base
  misc_feature (86)..(86): n is a, c, g, or t
tnctctataggataactgagaanatcacatggtctgggtgcaangcaatactctggagggagtgngataatgaggaggaaattgcnt

SEQ ID NO: 148 - DNA, 87 bp, Artificial Sequence
  Synthetic Probe
  modified_base (2)..(2): DNP phosphoramidite base
  misc_feature (2)..(2): n is a, c, g, or t
  modified_base (23)..(23): DNP phosphoramidite base
  misc_feature (23)..(23): n is a, c, g, or t
  modified_base (44)..(44): DNP phosphoramidite base
  misc_feature (44)..(44): n is a, c, g, or t
  modified_base (65)..(65): DNP phosphoramidite base
  misc_feature (65)..(65): n is a, c, g, or t
  modified_base (86)..(86): DNP phosphoramidite base
  misc_feature (86)..(86): n is a, c, g, or t
tnattaagtgttcactgtgcatngaaactactaagtgcaggaancccctgctcctagagaagtanctgaagaatggtggggcaggnt

SEQ ID NO: 149 - DNA, 87 bp, Artificial Sequence
  Synthetic Probe
  modified_base (2)..(2): DNP phosphoramidite base
  misc_feature (2)..(2): n is a, c, g, or t
  modified_base (23)..(23): DNP phosphoramidite base
  misc_feature (23)..(23): n is a, c, g, or t
  modified_base (44)..(44): DNP phosphoramidite base
  misc_feature (44)..(44): n is a, c, g, or t
  modified_base (65)..(65): DNP phosphoramidite base
  misc_feature (65)..(65): n is a, c, g, or t
  modified_base (86)..(86): DNP phosphoramidite base
  misc_feature (86)..(86): n is a, c, g, or t
tnttttcataacactaactatanggagcaaaagctcaacacctntgtatctcaggtttccccctnccctgatctggttgagtgtcnt

SEQ ID NO: 150 - DNA, 87 bp, Artificial Sequence
  Synthetic Probe
  modified_base (2)..(2): DNP phosphoramidite base
  misc_feature (2)..(2): n is a, c, g, or t
  modified_base (23)..(23): DNP phosphoramidite base
  misc_feature (23)..(23): n is a, c, g, or t
  modified_base (44)..(44): DNP phosphoramidite base
  misc_feature (44)..(44): n is a, c, g, or t
  modified_base (65)..(65): DNP phosphoramidite base
  misc_feature (65)..(65): n is a, c, g, or t
  modified_base (86)..(86): DNP phosphoramidite base
  misc_feature (86)..(86): n is a, c, g, or t
tnagctccagtttccacaagtanatgtaagaagatggtcacagnactacaacttctcagtgaggnagtcagtatattctttatctnt

SEQ ID NO: 151 - DNA, 87 bp, Artificial Sequence
  Synthetic Probe
  modified_base (2)..(2): DNP phosphoramidite base
  misc_feature (2)..(2): n is a, c, g, or t
  modified_base (23)..(23): DNP phosphoramidite base
  misc_feature (23)..(23): n is a, c, g, or t
  modified_base (44)..(44): DNP phosphoramidite base
  misc_feature (44)..(44): n is a, c, g, or t
  modified_base (65)..(65): DNP phosphoramidite base
  misc_feature (65)..(65): n is a, c, g, or t
  modified_base (86)..(86): DNP phosphoramidite base
  misc_feature (86)..(86): n is a, c, g, or t
tncagatggacctgaaaaaaagnaaggcaaggagttaacctttncttgtttctccagcaactttntccacagctattttcctcccnt

SEQ ID NO: 152 - DNA, 87 bp, Artificial Sequence
  Synthetic Probe
  modified_base (2)..(2): DNP phosphoramidite base
  misc_feature (2)..(2): n is a, c, g, or t
  modified_base (23)..(23): DNP phosphoramidite base
  misc_feature (23)..(23): n is a, c, g, or t
  modified_base (44)..(44): DNP phosphoramidite base
  misc_feature (44)..(44): n is a, c, g, or t
  modified_base (65)..(65): DNP phosphoramidite base
  misc_feature (65)..(65): n is a, c, g, or t
  modified_base (86)..(86): DNP phosphoramidite base
  misc_feature (86)..(86): n is a, c, g, or t
tnattccatttctaatttgatgnactctccgaggaaattctaangaggccctatgtctagaacgngaaggaagtccttcatctggnt

SEQ ID NO: 153 - DNA, 87 bp, Artificial Sequence
  Synthetic Probe
  modified_base (2)..(2): DNP phosphoramidite base
  misc_feature (2)..(2): n is a, c, g, or t
  modified_base (23)..(23): DNP phosphoramidite base
  misc_feature (23)..(23): n is a, c, g, or t
  modified_base (44)..(44): DNP phosphoramidite base
  misc_feature (44)..(44): n is a, c, g, or t
  modified_base (65)..(65): DNP phosphoramidite base
  misc_feature (65)..(65): n is a, c, g, or t
  modified_base (86)..(86): DNP phosphoramidite base
  misc_feature (86)..(86): n is a, c, g, or t
tntttgagcagatgaagtacagngaattcaggacacagtgatanctgaacagaaggtgtttcagnattgcacctcatcccatttcnt

SEQ ID NO: 154 - DNA, 87 bp, Artificial Sequence
  Synthetic Probe
  modified_base (2)..(2): DNP phosphoramidite base
  misc_feature (2)..(2): n is a, c, g, or t
  modified_base (23)..(23): DNP phosphoramidite base
  misc_feature (23)..(23): n is a, c, g, or t
  modified_base (44)..(44): DNP phosphoramidite base
  misc_feature (44)..(44): n is a, c, g, or t
  modified_base (65)..(65): DNP phosphoramidite base
  misc_feature (65)..(65): n is a, c, g, or t
  modified_base (86)..(86): DNP phosphoramidite base
  misc_feature (86)..(86): n is a, c, g, or t
tnaggatgccgtaagttaaccanccaaaacgaagcatattgacntcacctcacttaacccctggngaggctcaaaatatggttgant

SEQ ID NO: 155 - DNA, 87 bp, Artificial Sequence
  Synthetic Probe
  modified_base (2)..(2): DNP phosphoramidite base
  misc_feature (2)..(2): n is a, c, g, or t
  modified_base (23)..(23): DNP phosphoramidite base
  misc_feature (23)..(23): n is a, c, g, or t
  modified_base (44)..(44): DNP phosphoramidite base
  misc_feature (44)..(44): n is a, c, g, or t
  modified_base (65)..(65): DNP phosphoramidite base
  misc_feature (65)..(65): n is a, c, g, or t
  modified_base (86)..(86): DNP phosphoramidite base
  misc_feature (86)..(86): n is a, c, g, or t
tncatatttcaggtgttatcttnctcttccctcaagggaaacgnatgcatcaaacagaactgtgnatttttcagggctaactgtant

SEQ ID NO: 156 - DNA, 87 bp, Artificial Sequence
  Synthetic Probe
  modified_base (2)..(2): DNP phosphoramidite base
  misc_feature (2)..(2): n is a, c, g, or t
  modified_base (23)..(23): DNP phosphoramidite base
  misc_feature (23)..(23): n is a, c, g, or t
  modified_base (44)..(44): DNP phosphoramidite base
  misc_feature (44)..(44): n is a, c, g, or t
  modified_base (65)..(65): DNP phosphoramidite base
  misc_feature (65)..(65): n is a, c, g, or t
  modified_base (86)..(86): DNP phosphoramidite base
  misc_feature (86)..(86): n is a, c, g, or t
tntgtagattttcttttcattgnctagtgcttgtctctgtaacnacatgacactaggtgatgtcntggtgccacacttccatttgnt

SEQ ID NO: 157 - DNA, 87 bp, Artificial Sequence
  Synthetic Probe
  modified_base (2)..(2): DNP phosphoramidite base
  misc_feature (2)..(2): n is a, c, g, or t
  modified_base (23)..(23): DNP phosphoramidite base
  misc_feature (23)..(23): n is a, c, g, or t
  modified_base (44)..(44): DNP phosphoramidite base
  misc_feature (44)..(44): n is a, c, g, or t
  modified_base (65)..(65): DNP phosphoramidite base
  misc_feature (65)..(65): n is a, c, g, or t
  modified_base (86)..(86): DNP phosphoramidite base
  misc_feature (86)..(86): n is a, c, g, or t
tnacatttgtctcctttctgtgngccagaattgttttgtatttncaagtatggaaaggagctttngccagaatcctcccgtgctant

SEQ ID NO: 158 - DNA, 87 bp, Artificial Sequence
  Synthetic Probe
  modified_base (2)..(2): DNP phosphoramidite base
  misc_feature (2)..(2): n is a, c, g, or t
  modified_base (23)..(23): DNP phosphoramidite base
  misc_feature (23)..(23): n is a, c, g, or t
  modified_base (44)..(44): DNP phosphoramidite base
  misc_feature (44)..(44): n is a, c, g, or t
  modified_base (65)..(65): DNP phosphoramidite base
  misc_feature (65)..(65): n is a, c, g, or t
  modified_base (86)..(86): DNP phosphoramidite base
  misc_feature (86)..(86): n is a, c, g, or t
tnactttaacatggttgtgtgantagtaatgacattcatatctngactctaggcaaggcatggcntggaatgaaaaacattgactnt

SEQ ID NO: 159 - DNA, 87 bp, Artificial Sequence
  Synthetic Probe
  modified_base (2)..(2): DNP phosphoramidite base
  misc_feature (2)..(2): n is a, c, g, or t
  modified_base (23)..(23): DNP phosphoramidite base
  misc_feature (23)..(23): n is a, c, g, or t
  modified_base (44)..(44): DNP phosphoramidite base
  misc_feature (44)..(44): n is a, c, g, or t
  modified_base (65)..(65): DNP phosphoramidite base
  misc_feature (65)..(65): n is a, c, g, or t
  modified_base (86)..(86): DNP phosphoramidite base
  misc_feature (86)..(86): n is a, c, g, or t
tnttaaggtgaacttctcagatnactagatctcttagctcacantagtggaattttgaggaaagntacagggtttgctcttcatcnt

SEQ ID NO: 160 - DNA, 87 bp, Artificial Sequence
  Synthetic Probe
  modified_base (2)..(2): DNP phosphoramidite base
  misc_feature (2)..(2): n is a, c, g, or t
  modified_base (23)..(23): DNP phosphoramidite base
  misc_feature (23)..(23): n is a, c, g, or t
  modified_base (44)..(44): DNP phosphoramidite base
  misc_feature (44)..(44): n is a, c, g, or t
  modified_base (65)..(65): DNP phosphoramidite base
  misc_feature (65)..(65): n is a, c, g, or t
  modified_base (86)..(86): DNP phosphoramidite base
  misc_feature (86)..(86): n is a, c, g, or t
tnagaaaagaaagaaatacagtncaagtgaaactacgaccacanaagaggaacagatccatctcnatttaccattggggtatggant

SEQ ID NO: 161 - DNA, 87 bp, Artificial Sequence
  Synthetic Probe
  modified_base (2)..(2): DNP phosphoramidite base
  misc_feature (2)..(2): n is a, c, g, or t
  modified_base (23)..(23): DNP phosphoramidite base
  misc_feature (23)..(23): n is a, c, g, or t
  modified_base (44)..(44): DNP phosphoramidite base
  misc_feature (44)..(44): n is a, c, g, or t
  modified_base (65)..(65): DNP phosphoramidite base
  misc_feature (65)..(65): n is a, c, g, or t
  modified_base (86)..(86): DNP phosphoramidite base
  misc_feature (86)..(86): n is a, c, g, or t
tncggacgtgcggtgttcgaganagactgttattggtcagagtntttgctctagaggacaagtanggactgtaacatctctaggant

SEQ ID NO: 162 - DNA, 87 bp, Artificial Sequence
  Synthetic Probe
  modified_base (2)..(2): DNP phosphoramidite base
  misc_feature (2)..(2): n is a, c, g, or t
  modified_base (23)..(23): DNP phosphoramidite base
  misc_feature (23)..(23): n is a, c, g, or t
  modified_base (44)..(44): DNP phosphoramidite base
  misc_feature (44)..(44): n is a, c, g, or t
  modified_base (65)..(65): DNP phosphoramidite base
  misc_feature (65)..(65): n is a, c, g, or t
  modified_base (86)..(86): DNP phosphoramidite base
  misc_feature (86)..(86): n is a, c, g, or t
tntcactgctcctacgcttttcncaatattacaacaaaagaccnagtagggggagaaaaacgcancagtaccgaacccttatcagnt

SEQ ID NO: 163 - DNA, 87 bp, Artificial Sequence
  Synthetic Probe
  modified_base (2)..(2): DNP phosphoramidite base
  misc_feature (2)..(2): n is a, c, g, or t
  modified_base (23)..(23): DNP phosphoramidite base
  misc_feature (23)..(23): n is a, c, g, or t
  modified_base (44)..(44): DNP phosphoramidite base
  misc_feature (44)..(44): n is a, c, g, or t
  modified_base (65)..(65): DNP phosphoramidite base
  misc_feature (65)..(65): n is a, c, g, or t
  modified_base (86)..(86): DNP phosphoramidite base
  misc_feature (86)..(86): n is a, c, g, or t
tnaaaagtcaacagattgatttnactctcaagcaaacagacttnctaaggtacgcagcaccaagnacactaccttgaatcaaatcnt

SEQ ID NO: 164 - DNA, 87 bp, Artificial Sequence
  Synthetic Probe
  modified_base (2)..(2): DNP phosphoramidite base
  misc_feature (2)..(2): n is a, c, g, or t
  modified_base (23)..(23): DNP phosphoramidite base
  misc_feature (23)..(23): n is a, c, g, or t
  modified_base (44)..(44): DNP phosphoramidite base
  misc_feature (44)..(44): n is a, c, g, or t
  modified_base (65)..(65): DNP phosphoramidite base
  misc_feature (65)..(65): n is a, c, g, or t
  modified_base (86)..(86): DNP phosphoramidite base
  misc_feature (86)..(86): n is a, c, g, or t
tnatgacatttctgaagtctctngttggcattacgcgaaaaatncccccacgtcttctgaatagnttagaattgaatcctacaagnt

SEQ ID NO: 165 - DNA, 87 bp, Artificial Sequence
  Synthetic Probe
  modified_base (2)..(2): DNP phosphoramidite base
  misc_feature (2)..(2): n is a, c, g, or t
  modified_base (23)..(23): DNP phosphoramidite base
  misc_feature (23)..(23): n is a, c, g, or t
  modified_base (44)..(44): DNP phosphoramidite base
  misc_feature (44)..(44): n is a, c, g, or t
  modified_base (65)..(65): DNP phosphoramidite base
  misc_feature (65)..(65): n is a, c, g, or t
  modified_base (86)..(86): DNP phosphoramidite base
  misc_feature (86)..(86): n is a, c, g, or t
tnaaaggactgcagagggctgtngacagtgcattccgccttcgnggatggtatacaacttaaacncatgtcggcagaagaacgcant

SEQ ID NO: 166 - DNA, 87 bp, Artificial Sequence
  Synthetic Probe
  modified_base (2)..(2): DNP phosphoramidite base
  misc_feature (2)..(2): n is a, c, g, or t
  modified_base (23)..(23): DNP phosphoramidite base
  misc_feature (23)..(23): n is a, c, g, or t
  modified_base (44)..(44): DNP phosphoramidite base
  misc_feature (44)..(44): n is a, c, g, or t
  modified_base (65)..(65): DNP phosphoramidite base
  misc_feature (65)..(65): n is a, c, g, or t
  modified_base (86)..(86): DNP phosphoramidite base
  misc_feature (86)..(86): n is a, c, g, or t
tnggcggttagccaccgcacctncctctcacccccgaactaatnctcgtttcctctatgggtgtnaaaagtgaaataacccacttnt

SEQ ID NO: 167 - DNA, 87 bp, Artificial Sequence
  Synthetic Probe
  modified_base (2)..(2): DNP phosphoramidite base
  misc_feature (2)..(2): n is a, c, g, or t
  modified_base (23)..(23): DNP phosphoramidite base
  misc_feature (23)..(23): n is a, c, g, or t
  modified_base (44)..(44): DNP phosphoramidite base
  misc_feature (44)..(44): n is a, c, g, or t
  modified_base (65)..(65): DNP phosphoramidite base
  misc_feature (65)..(65): n is a, c, g, or t
  modified_base (86)..(86): DNP phosphoramidite base
  misc_feature (86)..(86): n is a, c, g, or t
tncgtcagaagagcagccccaanctgtacataaacttcgggcgngaaaagcaagacgcaggcgcnagtagcacatattgttacccnt

SEQ ID NO: 168 - DNA, 87 bp, Artificial Sequence
  Synthetic Probe
  modified_base (2)..(2): DNP phosphoramidite base
  misc_feature (2)..(2): n is a, c, g, or t
  modified_base (23)..(23): DNP phosphoramidite base
  misc_feature (23)..(23): n is a, c, g, or t
  modified_base (44)..(44): DNP phosphoramidite base
  misc_feature (44)..(44): n is a, c, g, or t
  modified_base (65)..(65): DNP phosphoramidite base
  misc_feature (65)..(65): n is a, c, g, or t
  modified_base (86)..(86): DNP phosphoramidite base
  misc_feature (86)..(86): n is a, c, g, or t
tnaacgcttagatctttcattcnatagacctgagacactgactncatgtgacttgtctctttacntaagtgtattatgtgatgccnt

SEQ ID NO: 169 - DNA, 87 bp, Artificial Sequence
  Synthetic Probe
  modified_base (2)..(2): DNP phosphoramidite base
  misc_feature (2)..(2): n is a, c, g, or t
  modified_base (23)..(23): DNP phosphoramidite base
  misc_feature (23)..(23): n is a, c, g, or t
  modified_base (44)..(44): DNP phosphoramidite base
  misc_feature (44)..(44): n is a, c, g, or t
  modified_base (65)..(65): DNP phosphoramidite base
  misc_feature (65)..(65): n is a, c, g, or t
  modified_base (86)..(86): DNP phosphoramidite base
  misc_feature (86)..(86): n is a, c, g, or t
tnacctcggctcgaggggtttanttttaggatgctaaaggaatnagtgatggtggccaaccgtgnttaccagacttgggaatcgant

SEQ ID NO: 170 - DNA, 87 bp, Artificial Sequence
  Synthetic Probe
  modified_base (2)..(2): DNP phosphoramidite base
  misc_feature (2)..(2): n is a, c, g, or t
  modified_base (23)..(23): DNP phosphoramidite base
  misc_feature (23)..(23): n is a, c, g, or t
  modified_base (44)..(44): DNP phosphoramidite base
  misc_feature (44)..(44): n is a, c, g, or t
  modified_base (65)..(65): DNP phosphoramidite base
  misc_feature (65)..(65): n is a, c, g, or t
  modified_base (86)..(86): DNP phosphoramidite base
  misc_feature (86)..(86): n is a, c, g, or t
tngaagcttcctcattccagcanctgcgcctttgtgcacatgcnaggacctgggttttcggaacngatgttttgaatcatagtttnt

SEQ ID NO: 171 - DNA, 87 bp, Artificial Sequence
  Synthetic Probe
  modified_base (2)..(2): DNP phosphoramidite base
  misc_feature (2)..(2): n is a, c, g, or t
  modified_base (23)..(23): DNP phosphoramidite base
  misc_feature (23)..(23): n is a, c, g, or t
  modified_base (44)..(44): DNP phosphoramidite base
  misc_feature (44)..(44): n is a, c, g, or t
  modified_base (65)..(65): DNP phosphoramidite base
  misc_feature (65)..(65): n is a, c, g, or t
  modified_base (86)..(86): DNP phosphoramidite base
  misc_feature (86)..(86): n is a, c, g, or t
tnttagaatacttgggtaggtanaattccaggttatctcagggngattatttctactgcgacttnttgaaccactgagggcaatant

SEQ ID NO: 172 - DNA, 87 bp, Artificial Sequence
  Synthetic Probe
  modified_base (2)..(2): DNP phosphoramidite base
  misc_feature (2)..(2): n is a, c, g, or t
  modified_base (23)..(23): DNP phosphoramidite base
  misc_feature (23)..(23): n is a, c, g, or t
  modified_base (44)..(44): DNP phosphoramidite base
  misc_feature (44)..(44): n is a, c, g, or t
  modified_base (65)..(65): DNP phosphoramidite base
  misc_feature (65)..(65): n is a, c, g, or t
  modified_base (86)..(86): DNP phosphoramidite base
  misc_feature (86)..(86): n is a, c, g, or t
tntgtaataaatcctattttccnactttgctgactgttagcacntgcaggtgtgattagggaccnaaaaaacactgtgacatttgnt

SEQ ID NO: 173 - DNA, 87 bp, Artificial Sequence
  Synthetic Probe
  modified_base (2)..(2): DNP phosphoramidite base
  misc_feature (2)..(2): n is a, c, g, or t
  modified_base (23)..(23): DNP phosphoramidite base
  misc_feature (23)..(23): n is a, c, g, or t
  modified_base (44)..(44): DNP phosphoramidite base
  misc_feature (44)..(44): n is a, c, g, or t
  modified_base (65)..(65): DNP phosphoramidite base
  misc_feature (65)..(65): n is a, c, g, or t
  modified_base (86)..(86): DNP phosphoramidite base
  misc_feature (86)..(86): n is a, c, g, or t
tngtttcagtctctcagaacccncattccactgtcaaacacccnaggtgttagtcaacctgcttngggaaataattatgcctggant

SEQ ID NO: 174 - DNA, 87 bp, Artificial Sequence
  Synthetic Probe
  modified_base (2)..(2): DNP phosphoramidite base
  misc_feature (2)..(2): n is a, c, g, or t
  modified_base (23)..(23): DNP phosphoramidite base
  misc_feature (23)..(23): n is a, c, g, or t
  modified_base (44)..(44): DNP phosphoramidite base
  misc_feature (44)..(44): n is a, c, g, or t
  modified_base (65)..(65): DNP phosphoramidite base
  misc_feature (65)..(65): n is a, c, g, or t
  modified_base (86)..(86): DNP phosphoramidite base
  misc_feature (86)..(86): n is a, c, g, or t
tntctgtggcagagaaaagctgnccattggaaaagaatggagtnggaaggattttcccccctttntttgaaaccgttagtgacttnt

SEQ ID NO: 175 - DNA, 87 bp, Artificial Sequence
  Synthetic Probe
  modified_base (2)..(2): DNP phosphoramidite base
  misc_feature (2)..(2): n is a, c, g, or t
  modified_base (23)..(23): DNP phosphoramidite base
  misc_feature (23)..(23): n is a, c, g, or t
  modified_base (44)..(44): DNP phosphoramidite base
  misc_feature (44)..(44): n is a, c, g, or t
  modified_base (65)..(65): DNP phosphoramidite base
  misc_feature (65)..(65): n is a, c, g, or t
  modified_base (86)..(86): DNP phosphoramidite base
  misc_feature (86)..(86): n is a, c, g, or t
tnggagcaattaaatgactgccnagacattgagagtaggtcatnctactgcacaccagttgccangggttataaaggccagcagant

SEQ ID NO: 176 - DNA, 87 bp, Artificial Sequence
  Synthetic Probe
  modified_base (2)..(2): DNP phosphoramidite base
  misc_feature (2)..(2): n is a, c, g, or t
  modified_base (23)..(23): DNP phosphoramidite base
  misc_feature (23)..(23): n is a, c, g, or t
  modified_base (44)..(44): DNP phosphoramidite base
  misc_feature (44)..(44): n is a, c, g, or t
  modified_base (65)..(65): DNP phosphoramidite base
  misc_feature (65)..(65): n is a, c, g, or t
  modified_base (86)..(86): DNP phosphoramidite base
  misc_feature (86)..(86): n is a, c, g, or t
tntttctttgagagttcttgctntttccaagttctttttcctgnatggacttatggcaggtctangacctgaaagtactattgtant

SEQ ID NO: 177 - DNA, 87 bp, Artificial Sequence
  Synthetic Probe
  modified_base (2)..(2): DNP phosphoramidite base
  misc_feature (2)..(2): n is a, c, g, or t
  modified_base (23)..(23): DNP phosphoramidite base
  misc_feature (23)..(23): n is a, c, g, or t
  modified_base (44)..(44): DNP phosphoramidite base
  misc_feature (44)..(44): n is a, c, g, or t
  modified_base (65)..(65): DNP phosphoramidite base
  misc_feature (65)..(65): n is a, c, g, or t
  modified_base (86)..(86): DNP phosphoramidite base
  misc_feature (86)..(86): n is a, c, g, or t
tngaagtgaattgaattctgtcnccttccaagaatttaccagtnggatccgatttctggatagtngggcaataaggttgccttcant

SEQ ID NO: 178 - DNA, 87 bp, Artificial Sequence
  Synthetic Probe
  modified_base (2)..(2): DNP phosphoramidite base
  misc_feature (2)..(2): n is a, c, g, or t
  modified_base (23)..(23): DNP phosphoramidite base
  misc_feature (23)..(23): n is a, c, g, or t
  modified_base (44)..(44): DNP phosphoramidite base
  misc_feature (44)..(44): n is a, c, g, or t
  modified_base (65)..(65): DNP phosphoramidite base
  misc_feature (65)..(65): n is a, c, g, or t
  modified_base (86)..(86): DNP phosphoramidite base
  misc_feature (86)..(86): n is a, c, g, or t
tntgtacaattttcacatctagntctgtgcttcctgtggattgnattttccctgtccattcctgngaatcttcgaattcccagcant

SEQ ID NO: 179 - DNA, 87 bp, Artificial Sequence
  Synthetic Probe
  modified_base (2)..(2): DNP phosphoramidite base
  misc_feature (2)..(2): n is a, c, g, or t
  modified_base (23)..(23): DNP phosphoramidite base
  misc_feature (23)..(23): n is a, c, g, or t
  modified_base (44)..(44): DNP phosphoramidite base
  misc_feature (44)..(44): n is a, c, g, or t
  modified_base (65)..(65): DNP phosphoramidite base
  misc_feature (65)..(65): n is a, c, g, or t
  modified_base (86)..(86): DNP phosphoramidite base
  misc_feature (86)..(86): n is a, c, g, or t
tncatcagttcaatctctaagtnctttgcctttaattaccaaancagctatgtggtgccactgantacgagtttctgtggtatcgnt

SEQ ID NO: 180 - DNA, 87 bp, Artificial Sequence
  Synthetic Probe
  modified_base (2)..(2): DNP phosphoramidite base
  misc_feature (2)..(2): n is a, c, g, or t
  modified_base (23)..(23): DNP phosphoramidite base
  misc_feature (23)..(23): n is a, c, g, or t
  modified_base (44)..(44): DNP phosphoramidite base
  misc_feature (44)..(44): n is a, c, g, or t
  modified_base (65)..(65): DNP phosphoramidite base
  misc_feature (65)..(65): n is a, c, g, or t
  modified_base (86)..(86): DNP phosphoramidite base
  misc_feature (86)..(86): n is a, c, g, or t
tngaaaatgtatatatgttcttngcgttttagcagttttggctnagactgctcttgatggtcatngcagggtaacttacttttctnt

SEQ ID NO: 181 - DNA, 87 bp, Artificial Sequence
  Synthetic Probe
  modified_base (2)..(2): DNP phosphoramidite base
  misc_feature (2)..(2): n is a, c, g, or t
  modified_base (23)..(23): DNP phosphoramidite base
  misc_feature (23)..(23): n is a, c, g, or t
  modified_base (44)..(44): DNP phosphoramidite base
  misc_feature (44)..(44): n is a, c, g, or t
  modified_base (65)..(65): DNP phosphoramidite base
  misc_feature (65)..(65): n is a, c, g, or t
  modified_base (86)..(86): DNP phosphoramidite base
  misc_feature (86)..(86): n is a, c, g, or t
tngcacatactcatttctagaancatggcaccccagaaataccntctttcagttactagctactntagtaccaacttttcaggctnt

SEQ ID NO: 182 - DNA, 87 bp, Artificial Sequence
  Synthetic Probe
  modified_base (2)..(2): DNP phosphoramidite base
  misc_feature (2)..(2): n is a, c, g, or t
  modified_base (23)..(23): DNP phosphoramidite base
  misc_feature (23)..(23): n is a, c, g, or t
  modified_base (44)..(44): DNP phosphoramidite base
  misc_feature (44)..(44): n is a, c, g, or t
  modified_base (65)..(65): DNP phosphoramidite base
  misc_feature (65)..(65): n is a, c, g, or t
  modified_base (86)..(86): DNP phosphoramidite base
  misc_feature (86)..(86): n is a, c, g, or t
tnagtcttcttggctcagtagcnaatgtcttctgtccagctagncaagaatggcacaggaggctncagggtacacttctcattacnt

SEQ ID NO: 183 - DNA, 87 bp, Artificial Sequence
  Synthetic Probe
  modified_base (2)..(2): DNP phosphoramidite base
  misc_feature (2)..(2): n is a, c, g, or t
  modified_base (23)..(23): DNP phosphoramidite base
  misc_feature (23)..(23): n is a, c, g, or t
  modified_base (44)..(44): DNP phosphoramidite base
  misc_feature (44)..(44): n is a, c, g, or t
  modified_base (65)..(65): DNP phosphoramidite base
  misc_feature (65)..(65): n is a, c, g, or t
  modified_base (86)..(86): DNP phosphoramidite base
  misc_feature (86)..(86): n is a, c, g, or t
tntttattcctttctcatttcanctttactgtccctacctgtcncttctacctttctactctccntcttttactttccacactgcnt

SEQ ID NO: 184 - DNA, 87 bp, Artificial Sequence
  Synthetic Probe
  modified_base (2)..(2): DNP phosphoramidite base
  misc_feature (2)..(2): n is a, c, g, or t
  modified_base (23)..(23): DNP phosphoramidite base
  misc_feature (23)..(23): n is a, c, g, or t
  modified_base (44)..(44): DNP phosphoramidite base
  misc_feature (44)..(44): n is a, c, g, or t
  modified_base (65)..(65): DNP phosphoramidite base
  misc_feature (65)..(65): n is a, c, g, or t
  modified_base (86)..(86): DNP phosphoramidite base
  misc_feature (86)..(86): n is a, c, g, or t
tngcctggaacctgaattttaantaaggcttccctctcatgatnccttacgcatatgatcccagngacaagatgttgaagaacagnt

SEQ ID NO: 185 - DNA, 87 bp, Artificial Sequence
  Synthetic Probe
  modified_base (2)..(2): DNP phosphoramidite base
  misc_feature (2)..(2): n is a, c, g, or t
  modified_base (23)..(23): DNP phosphoramidite base
  misc_feature (23)..(23): n is a, c, g, or t
  modified_base (44)..(44): DNP phosphoramidite base
  misc_feature (44)..(44): n is a, c, g, or t
  modified_base (65)..(65): DNP phosphoramidite base
  misc_feature (65)..(65): n is a, c, g, or t
  modified_base (86)..(86): DNP phosphoramidite base
  misc_feature (86)..(86): n is a, c, g, or t
tncagtttccaaagtttagatgntgtttagccttactgtagacnttcactcttaaggtgttgatnggaaatcaacaaccagctgcnt

SEQ ID NO: 186 - DNA, 87 bp, Artificial Sequence
  Synthetic Probe
  modified_base (2)..(2): DNP phosphoramidite base
  misc_feature (2)..(2): n is a, c, g, or t
  modified_base (23)..(23): DNP phosphoramidite base
  misc_feature (23)..(23): n is a, c, g, or t
  modified_base (44)..(44): DNP phosphoramidite base
  misc_feature (44)..(44): n is a, c, g, or t
  modified_base (65)..(65): DNP phosphoramidite base
  misc_feature (65)..(65): n is a, c, g, or t
  modified_base (86)..(86): DNP phosphoramidite base
  misc_feature (86)..(86): n is a, c, g, or t
tngtttcactttacaaccaagtnagagtgctacagttggatttnctttctctgaatctgtgtccnagcatcatgaactacgcaatnt

SEQ ID NO: 187 - DNA, 87 bp, Artificial Sequence
  Synthetic Probe
  modified_base (2)..(2): DNP phosphoramidite base
  misc_feature (2)..(2): n is a, c, g, or t
  modified_base (23)..(23): DNP phosphoramidite base
  misc_feature (23)..(23): n is a, c, g, or t
  modified_base (44)..(44): DNP phosphoramidite base
  misc_feature (44)..(44): n is a, c, g, or t
  modified_base (65)..(65): DNP phosphoramidite base
  misc_feature (65)..(65): n is a, c, g, or t
  modified_base (86)..(86): DNP phosphoramidite base
  misc_feature (86)..(86): n is a, c, g, or t
tnttttctattgtgaaaaccatnaaaaacggtattcagcgtgcncattagtgctgctggactccntcagttcttcatctgttgctnt

SEQ ID NO: 188 - DNA, 87 bp, Artificial Sequence
  Synthetic Probe
  modified_base (2)..(2): DNP phosphoramidite base
  misc_feature (2)..(2): n is a, c, g, or t
  modified_base (23)..(23): DNP phosphoramidite base
  misc_feature (23)..(23): n is a, c, g, or t
  modified_base (44)..(44): DNP phosphoramidite base
  misc_feature (44)..(44): n is a, c, g, or t
  modified_base (65)..(65): DNP phosphoramidite base
  misc_feature (65)..(65): n is a, c, g, or t
  modified_base (86)..(86): DNP phosphoramidite base
  misc_feature (86)..(86): n is a, c, g, or t
tnctgaggaaaacatagcaccanttgagtgctacagcatcctantagagaacttcagtttttggntcatactgttaagacctcttnt

SEQ ID NO: 189 - DNA, 87 bp, Artificial Sequence
  Synthetic Probe
  modified_base (2)..(2): DNP phosphoramidite base
  misc_feature (2)..(2): n is a, c, g, or t
  modified_base (23)..(23): DNP phosphoramidite base
  misc_feature (23)..(23): n is a, c, g, or t
  modified_base (44)..(44): DNP phosphoramidite base
  misc_feature (44)..(44): n is a, c, g, or t
  modified_base (65)..(65): DNP phosphoramidite base
  misc_feature (65)..(65): n is a, c, g, or t
  modified_base (86)..(86): DNP phosphoramidite base
  misc_feature (86)..(86): n is a, c, g, or t
tnaccactcactcacattctccnccaaagtgaagccaatgttgngtaacggagtgaattctagtngggggacattggaggggatant

SEQ ID NO: 190 - DNA, 87 bp, Artificial Sequence
  Synthetic Probe
  modified_base (2)..(2): DNP phosphoramidite base
  misc_feature (2)..(2): n is a, c, g, or t
  modified_base (23)..(23): DNP phosphoramidite base
  misc_feature (23)..(23): n is a, c, g, or t
  modified_base (44)..(44): DNP phosphoramidite base
  misc_feature (44)..(44): n is a, c, g, or t
  modified_base (65)..(65): DNP phosphoramidite base
  misc_feature (65)..(65): n is a, c, g, or t
  modified_base (86)..(86): DNP phosphoramidite base
  misc_feature (86)..(86): n is a, c, g, or t
tnaaaaatggattgatggttcantagacctaaacttcagttctntaccccagtaattacctacgntggtgtattgacaacaaaggnt

SEQ ID NO: 191 - DNA, 87 bp, Artificial Sequence
  Synthetic Probe
  modified_base (2)..(2): DNP phosphoramidite base
  misc_feature (2)..(2): n is a, c, g, or t
  modified_base (23)..(23): DNP phosphoramidite base
  misc_feature (23)..(23): n is a, c, g, or t
  modified_base (44)..(44): DNP phosphoramidite base
  misc_feature (44)..(44): n is a, c, g, or t
  modified_base (65)..(65): DNP phosphoramidite base
  misc_feature (65)..(65): n is a, c, g, or t
  modified_base (86)..(86): DNP phosphoramidite base
  misc_feature (86)..(86): n is a, c, g, or t
tnctctagttttgaatcctttcncagaggaaatctatagtcttnctctgtgggggctgcttatgnttttagagaaatactgaagant

SEQ ID NO: 192 - DNA, 87 bp, Artificial Sequence
  Synthetic Probe
  modified_base (2)..(2): DNP phosphoramidite base
  misc_feature (2)..(2): n is a, c, g, or t
  modified_base (23)..(23): DNP phosphoramidite base
  misc_feature (23)..(23): n is a, c, g, or t
  modified_base (44)..(44): DNP phosphoramidite base
  misc_feature (44)..(44): n is a, c, g, or t
  modified_base (65)..(65): DNP phosphoramidite base
  misc_feature (65)..(65): n is a, c, g, or t
  modified_base (86)..(86): DNP phosphoramidite base
  misc_feature (86)..(86): n is a, c, g, or t
tngattgggaagtcactgagtancaccaactggagttggagacnctggaattccagtagttccanggaacctcctagtcctgaacnt

SEQ ID NO: 193 - DNA, 87 bp, Artificial Sequence
  Synthetic Probe
  modified_base (2)..(2): DNP phosphoramidite base
  misc_feature (2)..(2): n is a, c, g, or t
  modified_base (23)..(23): DNP phosphoramidite base
  misc_feature (23)..(23): n is a, c, g, or t
  modified_base (44)..(44): DNP phosphoramidite base
  misc_feature (44)..(44): n is a, c, g, or t
  modified_base (65)..(65): DNP phosphoramidite base
  misc_feature (65)..(65): n is a, c, g, or t
  modified_base (86)..(86): DNP phosphoramidite base
  misc_feature (86)..(86): n is a, c, g, or t
tntttgagggtaatttaaggggntggaagtgatgtcatgcaagnagaggagttgaaagcaccaanatgttttaaccttggagattnt

SEQ ID NO: 194 - DNA, 87 bp, Artificial Sequence
  Synthetic Probe
  modified_base (2)..(2): DNP phosphoramidite base
  misc_feature (2)..(2): n is a, c, g, or t
  modified_base (23)..(23): DNP phosphoramidite base
  misc_feature (23)..(23): n is a, c, g, or t
  modified_base (44)..(44): DNP phosphoramidite base
  misc_feature (44)..(44): n is a, c, g, or t
  modified_base (65)..(65): DNP phosphoramidite base
  misc_feature (65)..(65): n is a, c, g, or t
  modified_base (86)..(86): DNP phosphoramidite base
  misc_feature (86)..(86): n is a, c, g, or t
tntagattaaaggttgtttttcntgtcaccacacaccagatatnggagagtagtaaaagcagacnagatggacagttctgttagtnt

SEQ ID NO: 195 - DNA, 87 bp, Artificial Sequence
  Synthetic Probe
  modified_base (2)..(2): DNP phosphoramidite base
  misc_feature (2)..(2): n is a, c, g, or t
  modified_base (23)..(23): DNP phosphoramidite base
  misc_feature (23)..(23): n is a, c, g, or t
  modified_base (44)..(44): DNP phosphoramidite base
  misc_feature (44)..(44): n is a, c, g, or t
  modified_base (65)..(65): DNP phosphoramidite base
  misc_feature (65)..(65): n is a, c, g, or t
  modified_base (86)..(86): DNP phosphoramidite base
  misc_feature (86)..(86): n is a, c, g, or t
tnaaactttcccatttctcttcnactttaatctcttcagtcgtntccctttcctgaattacctcntttactccctagtgacggctnt

SEQ ID NO: 196 - DNA, 87 bp, Artificial Sequence
  Synthetic Probe
  modified_base (2)..(2): DNP phosphoramidite base
  misc_feature (2)..(2): n is a, c, g, or t
  modified_base (23)..(23): DNP phosphoramidite base
  misc_feature (23)..(23): n is a, c, g, or t
  modified_base (44)..(44): DNP phosphoramidite base
  misc_feature (44)..(44): n is a, c, g, or t
  modified_base (65)..(65): DNP phosphoramidite base
  misc_feature (65)..(65): n is a, c, g, or t
  modified_base (86)..(86): DNP phosphoramidite base
  misc_feature (86)..(86): n is a, c, g, or t
tnttgtgctgaaattaagctacncctctctctgattgcacttcntgggagatctgagtttctttngcttgccaaagttattacttnt

SEQ ID NO: 197 - DNA, 87 bp, Artificial Sequence
  Synthetic Probe
  modified_base (2)..(2): DNP phosphoramidite base
  misc_feature (2)..(2): n is a, c, g, or t
  modified_base (23)..(23): DNP phosphoramidite base
  misc_feature (23)..(23): n is a, c, g, or t
  modified_base (44)..(44): DNP phosphoramidite base
  misc_feature (44)..(44): n is a, c, g, or t
  modified_base (65)..(65): DNP phosphoramidite base
  misc_feature (65)..(65): n is a, c, g, or t
  modified_base (86)..(86): DNP phosphoramidite base
  misc_feature (86)..(86): n is a, c, g, or t
tnatctttttatttgattcactntaccagcaggctgttttcctngctgcaaagcaaattggtggnagtccatttacaccttctccnt

SEQ ID NO: 198 - DNA, 87 bp, Artificial Sequence
  Synthetic Probe
  modified_base (2)..(2): DNP phosphoramidite base
  misc_feature (2)..(2): n is a, c, g, or t
  modified_base (23)..(23): DNP phosphoramidite base
  misc_feature (23)..(23): n is a, c, g, or t
  modified_base (44)..(44): DNP phosphoramidite base
  misc_feature (44)..(44): n is a, c, g, or t
  modified_base (65)..(65): DNP phosphoramidite base
  misc_feature (65)..(65): n is a, c, g, or t
  modified_base (86)..(86): DNP phosphoramidite base
  misc_feature (86)..(86): n is a, c, g, or t
tnccagacagtgtcatttgattnttgaaaatattgtccttgcanacagccagctaggacaatgancatactaatatctgctttgcnt

SEQ ID NO: 199 - DNA, 87 bp, Artificial Sequence
  Synthetic Probe
  modified_base (2)..(2): DNP phosphoramidite base
  misc_feature (2)..(2): n is a, c, g, or t
  modified_base (23)..(23): DNP phosphoramidite base
  misc_feature (23)..(23): n is a, c, g, or t
  modified_base (44)..(44): DNP phosphoramidite base
  misc_feature (44)..(44): n is a, c, g, or t
  modified_base (65)..(65): DNP phosphoramidite base
  misc_feature (65)..(65): n is a, c, g, or t
  modified_base (86)..(86): DNP phosphoramidite base
  misc_feature (86)..(86): n is a, c, g, or t
tntatgtaatcatagtcaacagnacaccatagctacagttttantgacacttggtctcaggaaantagagaactctacagaagacnt

SEQ ID NO: 200 - DNA, 87 bp, Artificial Sequence
  Synthetic Probe
  modified_base (2)..(2): DNP phosphoramidite base
  misc_feature (2)..(2): n is a, c, g, or t
  modified_base (23)..(23): DNP phosphoramidite base
  misc_feature (23)..(23): n is a, c, g, or t
  modified_base (44)..(44): DNP phosphoramidite base
  misc_feature (44)..(44): n is a, c, g, or t
  modified_base (65)..(65): DNP phosphoramidite base
  misc_feature (65)..(65): n is a, c, g, or t
  modified_base (86)..(86): DNP phosphoramidite base
  misc_feature (86)..(86): n is a, c, g, or t
tngatgaagctttatcattagtnccctggttctctcccctccangatcactttggccttctgacnagacagtacagataaatctgnt

SEQ ID NO: 201 - DNA, 87 bp, Artificial Sequence
  Synthetic Probe
  modified_base (2)..(2): DNP phosphoramidite base
  misc_feature (2)..(2): n is a, c, g, or t
  modified_base (23)..(23): DNP phosphoramidite base
  misc_feature (23)..(23): n is a, c, g, or t
  modified_base (44)..(44): DNP phosphoramidite base
  misc_feature (44)..(44): n is a, c, g, or t
  modified_base (65)..(65): DNP phosphoramidite base
  misc_feature (65)..(65): n is a, c, g, or t
  modified_base (86)..(86): DNP phosphoramidite base
  misc_feature (86)..(86): n is a, c, g, or t
tngactgaaaatcttctgtttanggcattttggtggggattttnttcccctctgtggataccganctgttatatttaaggaagatnt

SEQ ID NO: 202 - DNA, 87 bp, Artificial Sequence
  Synthetic Probe
  modified_base (2)..(2): DNP phosphoramidite base
  misc_feature (2)..(2): n is a, c, g, or t
  modified_base (23)..(23): DNP phosphoramidite base
  misc_feature (23)..(23): n is a, c, g, or t
  modified_base (44)..(44): DNP phosphoramidite base
  misc_feature (44)..(44): n is a, c, g, or t
  modified_base (65)..(65): DNP phosphoramidite base
  misc_feature (65)..(65): n is a, c, g, or t
  modified_base (86)..(86): DNP phosphoramidite base
  misc_feature (86)..(86): n is a, c, g, or t
tnaaagagtatcactagaagggnatagtacttgaatacaagtcncctatggtgactaaattatgntcctcaccccatgatataagnt

SEQ ID NO: 203 - DNA, 87 bp, Artificial Sequence
  Synthetic Probe
  modified_base (2)..(2): DNP phosphoramidite base
  misc_feature (2)..(2): n is a, c, g, or t
  modified_base (23)..(23): DNP phosphoramidite base
  misc_feature (23)..(23): n is a, c, g, or t
  modified_base (44)..(44): DNP phosphoramidite base
  misc_feature (44)..(44): n is a, c, g, or t
  modified_base (65)..(65): DNP phosphoramidite base
  misc_feature (65)..(65): n is a, c, g, or t
  modified_base (86)..(86): DNP phosphoramidite base
  misc_feature (86)..(86): n is a, c, g, or t
tnttttgatgaagaaagactgtngggaacagtgtgtagcaactngttttccaagaagttatccanctctcacccatagtagtggant

SEQ ID NO: 204 - DNA, 87 bp, Artificial Sequence
  Synthetic Probe
  modified_base (2)..(2): DNP phosphoramidite base
  misc_feature (2)..(2): n is a, c, g, or t
  modified_base (23)..(23): DNP phosphoramidite base
  misc_feature (23)..(23): n is a, c, g, or t
  modified_base (44)..(44): DNP phosphoramidite base
  misc_feature (44)..(44): n is a, c, g, or t
  modified_base (65)..(65): DNP phosphoramidite base
  misc_feature (65)..(65): n is a, c, g, or t
  modified_base (86)..(86): DNP phosphoramidite base
  misc_feature (86)..(86): n is a, c, g, or t
tntgttagcttcattatggcaangaaagagtgaagttacttttncgtgaagccctgggctttttngaagaaaaagagaggagaggnt

SEQ ID NO: 205 - DNA, 87 bp, Artificial Sequence
  Synthetic Probe
  modified_base (2)..(2): DNP phosphoramidite base
  misc_feature (2)..(2): n is a, c, g, or t
  modified_base (23)..(23): DNP phosphoramidite base
  misc_feature (23)..(23): n is a, c, g, or t
  modified_base (44)..(44): DNP phosphoramidite base
  misc_feature (44)..(44): n is a, c, g, or t
  modified_base (65)..(65): DNP phosphoramidite base
  misc_feature (65)..(65): n is a, c, g, or t
  modified_base (86)..(86): DNP phosphoramidite base
  misc_feature (86)..(86): n is a, c, g, or t
tntcaagaatggaacaatgtgtnggttagcatcatctttgaagnttccaagtcacaaagggattnttcttcctgaagtatgtgggnt

SEQ ID NO: 206 - DNA, 87 bp, Artificial Sequence
  Synthetic Probe
  modified_base (2)..(2): DNP phosphoramidite base
  misc_feature (2)..(2): n is a, c, g, or t
  modified_base (23)..(23): DNP phosphoramidite base
  misc_feature (23)..(23): n is a, c, g, or t
  modified_base (44)..(44): DNP phosphoramidite base
  misc_feature (44)..(44): n is a, c, g, or t
  modified_base (65)..(65): DNP phosphoramidite base
  misc_feature (65)..(65): n is a, c, g, or t
  modified_base (86)..(86): DNP phosphoramidite base
  misc_feature (86)..(86): n is a, c, g, or t
tntaaacttgttgtaaagagttnaaaccatcaggaccttttctncttagagttccacaggagctngaaatgtttgcttagtaggant

SEQ ID NO: 207 - DNA, 87 bp, Artificial Sequence
  Synthetic Probe
  modified_base (2)..(2): DNP phosphoramidite base
  misc_feature (2)..(2): n is a, c, g, or t
  modified_base (23)..(23): DNP phosphoramidite base
  misc_feature (23)..(23): n is a, c, g, or t
  modified_base (44)..(44): DNP phosphoramidite base
  misc_feature (44)..(44): n is a, c, g, or t
  modified_base (65)..(65): DNP phosphoramidite base
  misc_feature (65)..(65): n is a, c, g, or t
  modified_base (86)..(86): DNP phosphoramidite base
  misc_feature (86)..(86): n is a, c, g, or t
tncttcattgatctcattggttnaaattttcattgaggcaaccnaggtgcatagacttctatttntcactgtcttcagtatatacnt

SEQ ID NO: 208 - DNA, 87 bp, Artificial Sequence
  Synthetic Probe
  modified_base (2)..(2): DNP phosphoramidite base
  misc_feature (2)..(2): n is a, c, g, or t
  modified_base (23)..(23): DNP phosphoramidite base
  misc_feature (23)..(23): n is a, c, g, or t
  modified_base (44)..(44): DNP phosphoramidite base
  misc_feature (44)..(44): n is a, c, g, or t
  modified_base (65)..(65): DNP phosphoramidite base
  misc_feature (65)..(65): n is a, c, g, or t
  modified_base (86)..(86): DNP phosphoramidite base
  misc_feature (86)..(86): n is a, c, g, or t
tnacaaagaagacttaagaattnggagagttctccctagggtcnagtggaattcaggatgatggntgcactgatctcaactaaaant

SEQ ID NO: 209 - DNA, 87 bp, Artificial Sequence
  Synthetic Probe
  modified_base (2)..(2): DNP phosphoramidite base
  misc_feature (2)..(2): n is a, c, g, or t
  modified_base (23)..(23): DNP phosphoramidite base
  misc_feature (23)..(23): n is a, c, g, or t
  modified_base (44)..(44): DNP phosphoramidite base
  misc_feature (44)..(44): n is a, c, g, or t
  modified_base (65)..(65): DNP phosphoramidite base
  misc_feature (65)..(65): n is a, c, g, or t
  modified_base (86)..(86): DNP phosphoramidite base
  misc_feature (86)..(86): n is a, c, g, or t
tnttgatgtgaaaatgcaaacangagttttcagtgttacctgantttagggtcactggaactgangagtgatggtttacttctgant

SEQ ID NO: 210 - DNA, 87 bp, Artificial Sequence
  Synthetic Probe
  modified_base (2)..(2): DNP phosphoramidite base
  misc_feature (2)..(2): n is a, c, g, or t
  modified_base (23)..(23): DNP phosphoramidite base
  misc_feature (23)..(23): n is a, c, g, or t
  modified_base (44)..(44): DNP phosphoramidite base
  misc_feature (44)..(44): n is a, c, g, or t
  modified_base (65)..(65): DNP phosphoramidite base
  misc_feature (65)..(65): n is a, c, g, or t
  modified_base (86)..(86): DNP phosphoramidite base
  misc_feature (86)..(86): n is a, c, g, or t
tntctttcagtctctctaaaagntgtgagttaaatctgttttcntcacggccagcttttaaaggntcagtgaaggacggcactttnt

SEQ ID NO: 211 - DNA, 87 bp, Artificial Sequence
  Synthetic Probe
  modified_base (2)..(2): DNP phosphoramidite base
  misc_feature (2)..(2): n is a, c, g, or t
  modified_base (23)..(23): DNP phosphoramidite base
  misc_feature (23)..(23): n is a, c, g, or t
  modified_base (44)..(44): DNP phosphoramidite base
  misc_feature (44)..(44): n is a, c, g, or t
  modified_base (65)..(65): DNP phosphoramidite base
  misc_feature (65)..(65): n is a, c, g, or t
  modified_base (86)..(86): DNP phosphoramidite base
  misc_feature (86)..(86): n is a, c, g, or t
tnagctagtatatattacagctngtccctttggactcactccangaaacagctcagtgactcttnagaggaagagaattttagagnt

SEQ ID NO: 212 - DNA, 87 bp, Artificial Sequence
  Synthetic Probe
  modified_base (2)..(2): DNP phosphoramidite base
  misc_feature (2)..(2): n is a, c, g, or t
  modified_base (23)..(23): DNP phosphoramidite base
  misc_feature (23)..(23): n is a, c, g, or t
  modified_base (44)..(44): DNP phosphoramidite base
  misc_feature (44)..(44): n is a, c, g, or t
  modified_base (65)..(65): DNP phosphoramidite base
  misc_feature (65)..(65): n is a, c, g, or t
  modified_base (86)..(86): DNP phosphoramidite base
  misc_feature (86)..(86): n is a, c, g, or t
tngcttttgatttttctttaacncatccgtttcctactatttcntactgctacctcgctttgttncaggcccttgttacattttcnt

SEQ ID NO: 213 - DNA, 87 bp, Artificial Sequence
  Synthetic Probe
  modified_base (2)..(2): DNP phosphoramidite base
  misc_feature (2)..(2): n is a, c, g, or t
  modified_base (23)..(23): DNP phosphoramidite base
  misc_feature (23)..(23): n is a, c, g, or t
  modified_base (44)..(44): DNP phosphoramidite base
  misc_feature (44)..(44): n is a, c, g, or t
  modified_base (65)..(65): DNP phosphoramidite base
  misc_feature (65)..(65): n is a, c, g, or t
  modified_base (86)..(86): DNP phosphoramidite base
  misc_feature (86)..(86): n is a, c, g, or t
tnaatacaagctgcttattttangcaaattgtggctgtttgcanttgctcaggctgccagttgtngccaattgtgctgaggtatgnt

SEQ ID NO: 214 - DNA, 87 bp, Artificial Sequence
  Synthetic Probe
  modified_base (2)..(2): DNP phosphoramidite base
  misc_feature (2)..(2): n is a, c, g, or t
  modified_base (23)..(23): DNP phosphoramidite base
  misc_feature (23)..(23): n is a, c, g, or t
  modified_base (44)..(44): DNP phosphoramidite base
  misc_feature (44)..(44): n is a, c, g, or t
  modified_base (65)..(65): DNP phosphoramidite base
  misc_feature (65)..(65): n is a, c, g, or t
  modified_base (86)..(86): DNP phosphoramidite base
  misc_feature (86)..(86): n is a, c, g, or t
tnctctttatttctgctacttanacgttgttcttaaaggcgtcngttacttctgctgggtagtanctgtctactcagttggactgnt

SEQ ID NO: 215 - DNA, 87 bp, Artificial Sequence
  Synthetic Probe
  modified_base (2)..(2): DNP phosphoramidite base
  misc_feature (2)..(2): n is a, c, g, or t
  modified_base (23)..(23): DNP phosphoramidite base
  misc_feature (23)..(23): n is a, c, g, or t
  modified_base (44)..(44): DNP phosphoramidite base
  misc_feature (44)..(44): n is a, c, g, or t
  modified_base (65)..(65): DNP phosphoramidite base
  misc_feature (65)..(65): n is a, c, g, or t
  modified_base (86)..(86): DNP phosphoramidite base
  misc_feature (86)..(86): n is a, c, g, or t
tntcaggcaggttggccttcgcntgagaagtgaccattgattgnctagaaaacaaagaaatgggnaggcattcagcaacctggggnt

SEQ ID NO: 216 - DNA, 87 bp, Artificial Sequence
  Synthetic Probe
  modified_base (2)..(2): DNP phosphoramidite base
  misc_feature (2)..(2): n is a, c, g, or t
  modified_base (23)..(23): DNP phosphoramidite base
  misc_feature (23)..(23): n is a, c, g, or t
  modified_base (44)..(44): DNP phosphoramidite base
  misc_feature (44)..(44): n is a, c, g, or t
  modified_base (65)..(65): DNP phosphoramidite base
  misc_feature (65)..(65): n is a, c, g, or t
  modified_base (86)..(86): DNP phosphoramidite base
  misc_feature (86)..(86): n is a, c, g, or t
tntccagatagtagtgatttgtncagtatgcatatgaatctttnagtcctggcattctgaactcnaaaacctcaatagagtggttnt

SEQ ID NO: 217 - DNA, 87 bp, Artificial Sequence
  Synthetic Probe
  modified_base (2)..(2): DNP phosphoramidite base
  misc_feature (2)..(2): n is a, c, g, or t
  modified_base (23)..(23): DNP phosphoramidite base
  misc_feature (23)..(23): n is a, c, g, or t
  modified_base (44)..(44): DNP phosphoramidite base
  misc_feature (44)..(44): n is a, c, g, or t
  modified_base (65)..(65): DNP phosphoramidite base
  misc_feature (65)..(65): n is a, c, g, or t
  modified_base (86)..(86): DNP phosphoramidite base
  misc_feature (86)..(86): n is a, c, g, or t
tncttgggaatctggggaactgngaagcagctgggaaagcaccnggcatctgagccactcagtanctcttccaggcttgtgtgtgnt

SEQ ID NO: 218 - DNA, 87 bp, Artificial Sequence
  Synthetic Probe
  modified_base (2)..(2): DNP phosphoramidite base
  misc_feature (2)..(2): n is a, c, g, or t
  modified_base (23)..(23): DNP phosphoramidite base
  misc_feature (23)..(23): n is a, c, g, or t
  modified_base (44)..(44): DNP phosphoramidite base
  misc_feature (44)..(44): n is a, c, g, or t
  modified_base (65)..(65): DNP phosphoramidite base
  misc_feature (65)..(65): n is a, c, g, or t
  modified_base (86)..(86): DNP phosphoramidite base
  misc_feature (86)..(86): n is a, c, g, or t
tnaaaaagcaaatgttagttccnatttgccacttctacactttnatgtgaaccctgggggtaatnggtttgtacagaataaggccnt

SEQ ID NO: 219 - DNA, 87 bp, Artificial Sequence
  Synthetic Probe
  modified_base (2)..(2): DNP phosphoramidite base
  misc_feature (2)..(2): n is a, c, g, or t
  modified_base (23)..(23): DNP phosphoramidite base
  misc_feature (23)..(23): n is a, c, g, or t
  modified_base (44)..(44): DNP phosphoramidite base
  misc_feature (44)..(44): n is a, c, g, or t
  modified_base (65)..(65): DNP phosphoramidite base
  misc_feature (65)..(65): n is a, c, g, or t
  modified_base (86)..(86): DNP phosphoramidite base
  misc_feature (86)..(86): n is a, c, g, or t
tncatctgacaaataaaaaagcntgtcattctgtctaccagaantgtcaaccagtgcctgccttnccaggatcaacaagtgttttnt

SEQ ID NO: 220 - DNA, 87 bp, Artificial Sequence
  Synthetic Probe
  modified_base (2)..(2): DNP phosphoramidite base
  misc_feature (2)..(2): n is a, c, g, or t
  modified_base (23)..(23): DNP phosphoramidite base
  misc_feature (23)..(23): n is a, c, g, or t
  modified_base (44)..(44): DNP phosphoramidite base
  misc_feature (44)..(44): n is a, c, g, or t
  modified_base (65)..(65): DNP phosphoramidite base
  misc_feature (65)..(65): n is a, c, g, or t
  modified_base (86)..(86): DNP phosphoramidite base
  misc_feature (86)..(86): n is a, c, g, or t
tntttaaaggattaagtttatgntttcctactatgggaaaccantcccaccccaaacttgatganccgcattatgtgcttttatant

SEQ ID NO: 221 - DNA, 87 bp, Artificial Sequence
  Synthetic Probe
  modified_base (2)..(2): DNP phosphoramidite base
  misc_feature (2)..(2): n is a, c, g, or t
  modified_base (23)..(23): DNP phosphoramidite base
  misc_feature (23)..(23): n is a, c, g, or t
  modified_base (44)..(44): DNP phosphoramidite base
  misc_feature (44)..(44): n is a, c, g, or t
  modified_base (65)..(65): DNP phosphoramidite base
  misc_feature (65)..(65): n is a, c, g, or t
  modified_base (86)..(86): DNP phosphoramidite base
  misc_feature (86)..(86): n is a, c, g, or t
tnatgcaatgggaattttgggtntgaattgcaacttacttttcnattcttcccatagcctcatcntctgtcttgatgaaaccttant

SEQ ID NO: 222 - DNA, 87 bp, Artificial Sequence
  Synthetic Probe
  modified_base (2)..(2): DNP phosphoramidite base
  misc_feature (2)..(2): n is a, c, g, or t
  modified_base (23)..(23): DNP phosphoramidite base
  misc_feature (23)..(23): n is a, c, g, or t
  modified_base (44)..(44): DNP phosphoramidite base
  misc_feature (44)..(44): n is a, c, g, or t
  modified_base (65)..(65): DNP phosphoramidite base
  misc_feature (65)..(65): n is a, c, g, or t
  modified_base (86)..(86): DNP phosphoramidite base
  misc_feature (86)..(86): n is a, c, g, or t
tncctccattggttctttctttnacttcccatagttaccaaaanacttccaccttaggcactgtncaaacctttgagaccatcatnt

SEQ ID NO: 223 - DNA, 87 bp, Artificial Sequence
  Synthetic Probe
  modified_base (2)..(2): DNP phosphoramidite base
  misc_feature (2)..(2): n is a, c, g, or t
  modified_base (23)..(23): DNP phosphoramidite base
  misc_feature (23)..(23): n is a, c, g, or t
  modified_base (44)..(44): DNP phosphoramidite base
  misc_feature (44)..(44): n is a, c, g, or t
  modified_base (65)..(65): DNP phosphoramidite base
  misc_feature (65)..(65): n is a, c, g, or t
  modified_base (86)..(86): DNP phosphoramidite base
  misc_feature (86)..(86): n is a, c, g, or t
tngaatcactattcataggggcnagtacccatgaagtatgtcantacagtttagaatggaaattnagcttggtctcaggtacttgnt

SEQ ID NO: 224 - DNA, 87 bp, Artificial Sequence
  Synthetic Probe
  modified_base (2)..(2): DNP phosphoramidite base
  misc_feature (2)..(2): n is a, c, g, or t
  modified_base (23)..(23): DNP phosphoramidite base
  misc_feature (23)..(23): n is a, c, g, or t
  modified_base (44)..(44): DNP phosphoramidite base
  misc_feature (44)..(44): n is a, c, g, or t
  modified_base (65)..(65): DNP phosphoramidite base
  misc_feature (65)..(65): n is a, c, g, or t
  modified_base (86)..(86): DNP phosphoramidite base
  misc_feature (86)..(86): n is a, c, g, or t
tnttctcaggaaatgtttggacnaaaaaagcaagtgaacagcangcctttggatgggacatcagntatgacttaatagattgaatnt

SEQ ID NO: 225 - DNA, 87 bp, Artificial Sequence
  Synthetic Probe
  modified_base (2)..(2): DNP phosphoramidite base
  misc_feature (2)..(2): n is a, c, g, or t
  modified_base (23)..(23): DNP phosphoramidite base
  misc_feature (23)..(23): n is a, c, g, or t
  modified_base (44)..(44): DNP phosphoramidite base
  misc_feature (44)..(44): n is a, c, g, or t
  modified_base (65)..(65): DNP phosphoramidite base
  misc_feature (65)..(65): n is a, c, g, or t
  modified_base (86)..(86): DNP phosphoramidite base
  misc_feature (86)..(86): n is a, c, g, or t
tntttattcttttcctgtctccnatcatcattcacatgaaggangaagtaagagttggcaagcanactccataaccaaactacccnt

SEQ ID NO: 226 - DNA, 87 bp, Artificial Sequence
  Synthetic Probe
  modified_base (2)..(2): DNP phosphoramidite base
  misc_feature (2)..(2): n is a, c, g, or t
  modified_base (23)..(23): DNP phosphoramidite base
  misc_feature (23)..(23): n is a, c, g, or t
  modified_base (44)..(44): DNP phosphoramidite base
  misc_feature (44)..(44): n is a, c, g, or t
  modified_base (65)..(65): DNP phosphoramidite base
  misc_feature (65)..(65): n is a, c, g, or t
  modified_base (86)..(86): DNP phosphoramidite base
  misc_feature (86)..(86): n is a, c, g, or t
tnagtagtataatccaatagctngactatcctgcatttctttgncttctctctatacagtcattntgggaataagagtacccctgnt

SEQ ID NO: 227 - DNA, 87 bp, Artificial Sequence
  Synthetic Probe
  modified_base (2)..(2): DNP phosphoramidite base
  misc_feature (2)..(2): n is a, c, g, or t
  modified_base (23)..(23): DNP phosphoramidite base
  misc_feature (23)..(23): n is a, c, g, or t
  modified_base (44)..(44): DNP phosphoramidite base
  misc_feature (44)..(44): n is a, c, g, or t
  modified_base (65)..(65): DNP phosphoramidite base
  misc_feature (65)..(65): n is a, c, g, or t
  modified_base (86)..(86): DNP phosphoramidite base
  misc_feature (86)..(86): n is a, c, g, or t
tnttctaagacattcaagaaaanagttctggtcttgttgctaanagatggccacccttttagagncctaggtaaggttaaaagagnt

SEQ ID NO: 228 - DNA, 87 bp, Artificial Sequence
  Synthetic Probe
  modified_base (2)..(2): DNP phosphoramidite base
  misc_feature (2)..(2): n is a, c, g, or t
  modified_base (23)..(23): DNP phosphoramidite base
  misc_feature (23)..(23): n is a, c, g, or t
  modified_base (44)..(44): DNP phosphoramidite base
  misc_feature (44)..(44): n is a, c, g, or t
  modified_base (65)..(65): DNP phosphoramidite base
  misc_feature (65)..(65): n is a, c, g, or t
  modified_base (86)..(86): DNP phosphoramidite base
  misc_feature (86)..(86): n is a, c, g, or t
tnagggaaggaagatagttcctncagcctacctaaaccactgtnaggtcagaaaacgtatcattncaggtcagaaatgagattgtnt

SEQ ID NO: 229 - DNA, 87 bp, Artificial Sequence
  Synthetic Probe
  modified_base (2)..(2): DNP phosphoramidite base
  misc_feature (2)..(2): n is a, c, g, or t
  modified_base (23)..(23): DNP phosphoramidite base
  misc_feature (23)..(23): n is a, c, g, or t
  modified_base (44)..(44): DNP phosphoramidite base
  misc_feature (44)..(44): n is a, c, g, or t
  modified_base (65)..(65): DNP phosphoramidite base
  misc_feature (65)..(65): n is a, c, g, or t
  modified_base (86)..(86): DNP phosphoramidite base
  misc_feature (86)..(86): n is a, c, g, or t
tntgaaagtttcctaaaataaanatcccagctattgcgtgatanactcagcagtctgggctctgnatttgaattgattaaaaaggnt

SEQ ID NO: 230 - DNA, 87 bp, Artificial Sequence
  Synthetic Probe
  modified_base (2)..(2): DNP phosphoramidite base
  misc_feature (2)..(2): n is a, c, g, or t
  modified_base (23)..(23): DNP phosphoramidite base
  misc_feature (23)..(23): n is a, c, g, or t
  modified_base (44)..(44): DNP phosphoramidite base
  misc_feature (44)..(44): n is a, c, g, or t
  modified_base (65)..(65): DNP phosphoramidite base
  misc_feature (65)..(65): n is a, c, g, or t
  modified_base (86)..(86): DNP phosphoramidite base
  misc_feature (86)..(86): n is a, c, g, or t
tntgtttttacaagtccttttcnccaacaatttcttttagcctncactagaccactttcacccangcaaagagagtatgaatgctnt

SEQ ID NO: 231 - DNA, 87 bp, Artificial Sequence
  Synthetic Probe
  modified_base (2)..(2): DNP phosphoramidite base
  misc_feature (2)..(2): n is a, c, g, or t
  modified_base (23)..(23): DNP phosphoramidite base
  misc_feature (23)..(23): n is a, c, g, or t
  modified_base (44)..(44): DNP phosphoramidite base
  misc_feature (44)..(44): n is a, c, g, or t
  modified_base (65)..(65): DNP phosphoramidite base
  misc_feature (65)..(65): n is a, c, g, or t
  modified_base (86)..(86): DNP phosphoramidite base
  misc_feature (86)..(86): n is a, c, g, or t
tncactatcaccaagcagatttncatcttcttacaggaaggggntacacagtgctgccagtcttngcttctgtctctgagtgttgnt

SEQ ID NO: 232 - DNA, 87 bp, Artificial Sequence
  Synthetic Probe
  modified_base (2)..(2): DNP phosphoramidite base
  misc_feature (2)..(2): n is a, c, g, or t
  modified_base (23)..(23): DNP phosphoramidite base
  misc_feature (23)..(23): n is a, c, g, or t
  modified_base (44)..(44): DNP phosphoramidite base
  misc_feature (44)..(44): n is a, c, g, or t
  modified_base (65)..(65): DNP phosphoramidite base
  misc_feature (65)..(65): n is a, c, g, or t
  modified_base (86)..(86): DNP phosphoramidite base
  misc_feature (86)..(86): n is a, c, g, or t
tnctgctctgtgttgtagaaacncctcttaattagaaagcagcnagtctaggatgtagattcagnagactgtacagtactgaggtnt

SEQ ID NO: 233 - DNA, 87 bp, Artificial Sequence
  Synthetic Probe
  modified_base (2)..(2): DNP phosphoramidite base
  misc_feature (2)..(2): n is a, c, g, or t
  modified_base (23)..(23): DNP phosphoramidite base
  misc_feature (23)..(23): n is a, c, g, or t
  modified_base (44)..(44): DNP phosphoramidite base
  misc_feature (44)..(44): n is a, c, g, or t
  modified_base (65)..(65): DNP phosphoramidite base
  misc_feature (65)..(65): n is a, c, g, or t
  modified_base (86)..(86): DNP phosphoramidite base
  misc_feature (86)..(86): n is a, c, g, or t
tnacaatatcagtattatcaccnaagttttctgtcatgcttcantcttctcctagtcattgttgncttctaaaatgttcttccttnt

SEQ ID NO: 234 - DNA, 87 bp, Artificial Sequence
  Synthetic Probe
  modified_base (2)..(2): DNP phosphoramidite base
  misc_feature (2)..(2): n is a, c, g, or t
  modified_base (23)..(23): DNP phosphoramidite base
  misc_feature (23)..(23): n is a, c, g, or t
  modified_base (44)..(44): DNP phosphoramidite base
  misc_feature (44)..(44): n is a, c, g, or t
  modified_base (65)..(65): DNP phosphoramidite base
  misc_feature (65)..(65): n is a, c, g, or t
  modified_base (86)..(86): DNP phosphoramidite base
  misc_feature (86)..(86): n is a, c, g, or t
tntgtccaaagtattttggcctnataagtggacatagagtcaangtctagctgtaacaacagggntacatttagtaggaattgcant

SEQ ID NO: 235 - DNA, 87 bp, Artificial Sequence
  Synthetic Probe
  modified_base (2)..(2): DNP phosphoramidite base
  misc_feature (2)..(2): n is a, c, g, or t
  modified_base (23)..(23): DNP phosphoramidite base
  misc_feature (23)..(23): n is a, c, g, or t
  modified_base (44)..(44): DNP phosphoramidite base
  misc_feature (44)..(44): n is a, c, g, or t
  modified_base (65)..(65): DNP phosphoramidite base
  misc_feature (65)..(65): n is a, c, g, or t
  modified_base (86)..(86): DNP phosphoramidite base
  misc_feature (86)..(86): n is a, c, g, or t
tnaatagttgtacccttttattngcaaagaagaaagtggacatnttcaggtgacctgctaaggcnacaaaattgtcatcaacttcnt

SEQ ID NO: 236 - DNA, 87 bp, Artificial Sequence
  Synthetic Probe
  modified_base (2)..(2): DNP phosphoramidite base
  misc_feature (2)..(2): n is a, c, g, or t
  modified_base (23)..(23): DNP phosphoramidite base
  misc_feature (23)..(23): n is a, c, g, or t
  modified_base (44)..(44): DNP phosphoramidite base
  misc_feature (44)..(44): n is a, c, g, or t
  modified_base (65)..(65): DNP phosphoramidite base
  misc_feature (65)..(65): n is a, c, g, or t
  modified_base (86)..(86): DNP phosphoramidite base
  misc_feature (86)..(86): n is a, c, g, or t
tnaatttcattttttggtataantttcctgtgtcatgagagatnccacatgccactactaccatngtcccccaaaggaatagactnt

SEQ ID NO: 237 - DNA, 87 bp, Artificial Sequence
  Synthetic Probe
  modified_base (2)..(2): DNP phosphoramidite base
  misc_feature (2)..(2): n is a, c, g, or t
  modified_base (23)..(23): DNP phosphoramidite base
  misc_feature (23)..(23): n is a, c, g, or t
  modified_base (44)..(44): DNP phosphoramidite base
  misc_feature (44)..(44): n is a, c, g, or t
  modified_base (65)..(65): DNP phosphoramidite base
  misc_feature (65)..(65): n is a, c, g, or t
  modified_base (86)..(86): DNP phosphoramidite base
  misc_feature (86)..(86): n is a, c, g, or t
tnaaaggaagttggagtactagnaggaagtgattgacaatttgntagggccagggcttcaagggnggttaaaagaataaggcctgnt

SEQ ID NO: 238 - DNA, 87 bp, Artificial Sequence
  Synthetic Probe
  modified_base (2)..(2): DNP phosphoramidite base
  misc_feature (2)..(2): n is a, c, g, or t
  modified_base (23)..(23): DNP phosphoramidite base
  misc_feature (23)..(23): n is a, c, g, or t
  modified_base (44)..(44): DNP phosphoramidite base
  misc_feature (44)..(44): n is a, c, g, or t
  modified_base (65)..(65): DNP phosphoramidite base
  misc_feature (65)..(65): n is a, c, g, or t
  modified_base (86)..(86): DNP phosphoramidite base
  misc_feature (86)..(86): n is a, c, g, or t
tnaaggaaaggtggaaaatatgngagagtagcttacgagaaganacagagcaaggaaaaccaaanctttggatacttacgtgtcant

SEQ ID NO: 239 - DNA, 87 bp, Artificial Sequence
  Synthetic Probe
  modified_base (2)..(2): DNP phosphoramidite base
  misc_feature (2)..(2): n is a, c, g, or t
  modified_base (23)..(23): DNP phosphoramidite base
  misc_feature (23)..(23): n is a, c, g, or t
  modified_base (44)..(44): DNP phosphoramidite base
  misc_feature (44)..(44): n is a, c, g, or t
  modified_base (65)..(65): DNP phosphoramidite base
  misc_feature (65)..(65): n is a, c, g, or t
  modified_base (86)..(86): DNP phosphoramidite base
  misc_feature (86)..(86): n is a, c, g, or t
tnattgttcatagcagcatggtncagctttcttcttgatctatnagatgaggctcaggcactatncccatttataccaataaccant

SEQ ID NO: 240 - DNA, 87 bp, Artificial Sequence
  Synthetic Probe
  modified_base (2)..(2): DNP phosphoramidite base
  misc_feature (2)..(2): n is a, c, g, or t
  modified_base (23)..(23): DNP phosphoramidite base
  misc_feature (23)..(23): n is a, c, g, or t
  modified_base (44)..(44): DNP phosphoramidite base
  misc_feature (44)..(44): n is a, c, g, or t
  modified_base (65)..(65): DNP phosphoramidite base
  misc_feature (65)..(65): n is a, c, g, or t
  modified_base (86)..(86): DNP phosphoramidite base
  misc_feature (86)..(86): n is a, c, g, or t
tngtttgatggtagaaactgaangatttaacagagaactgtgtntttacccgagtgccaaaaatngctgtgagcctccttgcacant

SEQ ID NO: 241 - DNA, 87 bp, Artificial Sequence
  Synthetic Probe
  modified_base (2)..(2): DNP phosphoramidite base
  misc_feature (2)..(2): n is a, c, g, or t
  modified_base (23)..(23): DNP phosphoramidite base
  misc_feature (23)..(23): n is a, c, g, or t
  modified_base (44)..(44): DNP phosphoramidite base
  misc_feature (44)..(44): n is a, c, g, or t
  modified_base (65)..(65): DNP phosphoramidite base
  misc_feature (65)..(65): n is a, c, g, or t
  modified_base (86)..(86): DNP phosphoramidite base
  misc_feature (86)..(86): n is a, c, g, or t
tncttctgggtacttcagtatcnagagatcagttctcgtggttntagacagttcctatctatagnctgactatccttgtccttgant

SEQ ID NO: 242 - DNA, 87 bp, Artificial Sequence
  Synthetic Probe
  modified_base (2)..(2): DNP phosphoramidite base
  misc_feature (2)..(2): n is a, c, g, or t
  modified_base (23)..(23): DNP phosphoramidite base
  misc_feature (23)..(23): n is a, c, g, or t
  modified_base (44)..(44): DNP phosphoramidite base
  misc_feature (44)..(44): n is a, c, g, or t
  modified_base (65)..(65): DNP phosphoramidite base
  misc_feature (65)..(65): n is a, c, g, or t
  modified_base (86)..(86): DNP phosphoramidite base
  misc_feature (86)..(86): n is a, c, g, or t
tntgtattttgaggtggtgcagngatccttacagcaggcacatnaataaacagggagcatggaangacacagagttggggtaaagnt

SEQ ID NO: 243 - DNA, 87 bp, Artificial Sequence
  Synthetic Probe
  modified_base (2)..(2): DNP phosphoramidite base
  misc_feature (2)..(2): n is a, c, g, or t
  modified_base (23)..(23): DNP phosphoramidite base
  misc_feature (23)..(23): n is a, c, g, or t
  modified_base (44)..(44): DNP phosphoramidite base
  misc_feature (44)..(44): n is a, c, g, or t
  modified_base (65)..(65): DNP phosphoramidite base
  misc_feature (65)..(65): n is a, c, g, or t
  modified_base (86)..(86): DNP phosphoramidite base
  misc_feature (86)..(86): n is a, c, g, or t
tngtatttggagaaccacagtgntaaacagtgttagcattaccnataatgctgtaaccaccaagnattcaccctcactcaggaatnt

SEQ ID NO: 244 - DNA, 87 bp, Artificial Sequence
  Synthetic Probe
  modified_base (2)..(2): DNP phosphoramidite base
  misc_feature (2)..(2): n is a, c, g, or t
  modified_base (23)..(23): DNP phosphoramidite base
  misc_feature (23)..(23): n is a, c, g, or t
  modified_base (44)..(44): DNP phosphoramidite base
  misc_feature (44)..(44): n is a, c, g, or t
  modified_base (65)..(65): DNP phosphoramidite base
  misc_feature (65)..(65): n is a, c, g, or t
  modified_base (86)..(86): DNP phosphoramidite base
  misc_feature (86)..(86): n is a, c, g, or t
tnctcatcacctctcatgctcantcatctcaagatgcactggcnttgtcctgatgaaaatgtgcnctttggaaggagtctaactant

SEQ ID NO: 245 - DNA, 87 bp, Artificial Sequence
  Synthetic Probe
  modified_base (2)..(2): DNP phosphoramidite base
  misc_feature (2)..(2): n is a, c, g, or t
  modified_base (23)..(23): DNP phosphoramidite base
  misc_feature (23)..(23): n is a, c, g, or t
  modified_base (44)..(44): DNP phosphoramidite base
  misc_feature (44)..(44): n is a, c, g, or t
  modified_base (65)..(65): DNP phosphoramidite base
  misc_feature (65)..(65): n is a, c, g, or t
  modified_base (86)..(86): DNP phosphoramidite base
  misc_feature (86)..(86): n is a, c, g, or t
tnatgtaatacatatgcaaaacnatcccagaagggacagacaanaattcctgccatgaagacctntgtggtgatgttgaagagaant

SEQ ID NO: 246 - DNA, 87 bp, Artificial Sequence
  Synthetic Probe
  modified_base (2)..(2): DNP phosphoramidite base
  misc_feature (2)..(2): n is a, c, g, or t
  modified_base (23)..(23): DNP phosphoramidite base
  misc_feature (23)..(23): n is a, c, g, or t
  modified_base (44)..(44): DNP phosphoramidite base
  misc_feature (44)..(44): n is a, c, g, or t
  modified_base (65)..(65): DNP phosphoramidite base
  misc_feature (65)..(65): n is a, c, g, or t
  modified_base (86)..(86): DNP phosphoramidite base
  misc_feature (86)..(86): n is a, c, g, or t
tngaatatatgagaccagctctntcatataccctcacactcacnatataggtggactcctgtgtnttacttaccggttccttaaant

SEQ ID NO: 247 - DNA, 87 bp, Artificial Sequence
  Synthetic Probe
  modified_base (2)..(2): DNP phosphoramidite base
  misc_feature (2)..(2): n is a, c, g, or t
  modified_base (23)..(23): DNP phosphoramidite base
  misc_feature (23)..(23): n is a, c, g, or t
  modified_base (44)..(44): DNP phosphoramidite base
  misc_feature (44)..(44): n is a, c, g, or t
  modified_base (65)..(65): DNP phosphoramidite base
  misc_feature (65)..(65): n is a, c, g, or t
  modified_base (86)..(86): DNP phosphoramidite base
  misc_feature (86)..(86): n is a, c, g, or t
tntaatataacaaacttgagacnacactgtgcagtttaacatgngcctcaaggtctggggtatanaaaatcactagatatggccant

SEQ ID NO: 248 - DNA, 87 bp, Artificial Sequence
  Synthetic Probe
  modified_base (2)..(2): DNP phosphoramidite base
  misc_feature (2)..(2): n is a, c, g, or t
  modified_base (23)..(23): DNP phosphoramidite base
  misc_feature (23)..(23): n is a, c, g, or t
  modified_base (44)..(44): DNP phosphoramidite base
  misc_feature (44)..(44): n is a, c, g, or t
  modified_base (65)..(65): DNP phosphoramidite base
  misc_feature (65)..(65): n is a, c, g, or t
  modified_base (86)..(86): DNP phosphoramidite base
  misc_feature (86)..(86): n is a, c, g, or t
tnccttaaagattttagaaagcnttcaaaatagagtgggacatntctgtcccatgcacaaggccnccggtcagagcctttcaggtnt

SEQ ID NO: 249 - DNA, 87 bp, Artificial Sequence
  Synthetic Probe
  modified_base (2)..(2): DNP phosphoramidite base
  misc_feature (2)..(2): n is a, c, g, or t
  modified_base (23)..(23): DNP phosphoramidite base
  misc_feature (23)..(23): n is a, c, g, or t
  modified_base (44)..(44): DNP phosphoramidite base
  misc_feature (44)..(44): n is a, c, g, or t
  modified_base (65)..(65): DNP phosphoramidite base
  misc_feature (65)..(65): n is a, c, g, or t
  modified_base (86)..(86): DNP phosphoramidite base
  misc_feature (86)..(86): n is a, c, g, or t
tnggttgagggagtggggatagngtatgaactacgcagggcttncttaactaccaccctttatgngagcaaaactactcgctgagnt

SEQ ID NO: 250 - DNA, 87 bp, Artificial Sequence
  Synthetic Probe
  modified_base (2)..(2): DNP phosphoramidite base
  misc_feature (2)..(2): n is a, c, g, or t
  modified_base (23)..(23): DNP phosphoramidite base
  misc_feature (23)..(23): n is a, c, g, or t
  modified_base (44)..(44): DNP phosphoramidite base
  misc_feature (44)..(44): n is a, c, g, or t
  modified_base (65)..(65): DNP phosphoramidite base
  misc_feature (65)..(65): n is a, c, g, or t
  modified_base (86)..(86): DNP phosphoramidite base
  misc_feature (86)..(86): n is a, c, g, or t
tntaaaacttaattatgagcaancagtttggtaccagcttgcangaaggtaccctcaagccatcntcccaaatatgtcacattttnt

SEQ ID NO: 251 - DNA, 87 bp, Artificial Sequence
  Synthetic Probe
  modified_base (2)..(2): DNP phosphoramidite base
  misc_feature (2)..(2): n is a, c, g, or t
  modified_base (23)..(23): DNP phosphoramidite base
  misc_feature (23)..(23): n is a, c, g, or t
  modified_base (44)..(44): DNP phosphoramidite base
  misc_feature (44)..(44): n is a, c, g, or t
  modified_base (65)..(65): DNP phosphoramidite base
  misc_feature (65)..(65): n is a, c, g, or t
  modified_base (86)..(86): DNP phosphoramidite base
  misc_feature (86)..(86): n is a, c, g, or t
tntcttccactccccctgggccntcctgttgctctttggctgtnccaaaaaaaaaagggctgtcncaaaaataaagcaatgtccant

SEQ ID NO: 252 - DNA, 87 bp, Artificial Sequence
  Synthetic Probe
  modified_base (2)..(2): DNP phosphoramidite base
  misc_feature (2)..(2): n is a, c, g, or t
  modified_base (23)..(23): DNP phosphoramidite base
  misc_feature (23)..(23): n is a, c, g, or t
  modified_base (44)..(44): DNP phosphoramidite base
  misc_feature (44)..(44): n is a, c, g, or t
  modified_base (65)..(65): DNP phosphoramidite base
  misc_feature (65)..(65): n is a, c, g, or t
  modified_base (86)..(86): DNP phosphoramidite base
  misc_feature (86)..(86): n is a, c, g, or t
tnctttttctagaccatggcagnagagtcacagattgagaaacncaaagccagcctctcctcctnttaccgctgtgcctggatctnt

SEQ ID NO: 253 - DNA, 87 bp, Artificial Sequence
  Synthetic Probe
  modified_base (2)..(2): DNP phosphoramidite base
  misc_feature (2)..(2): n is a, c, g, or t
  modified_base (23)..(23): DNP phosphoramidite base
  misc_feature (23)..(23): n is a, c, g, or t
  modified_base (44)..(44): DNP phosphoramidite base
  misc_feature (44)..(44): n is a, c, g, or t
  modified_base (65)..(65): DNP phosphoramidite base
  misc_feature (65)..(65): n is a, c, g, or t
  modified_base (86)..(86): DNP phosphoramidite base
  misc_feature (86)..(86): n is a, c, g, or t
tnaagcccatcatggcaaacccncagcatcacggctcggtcctnctccagcactggatggcagcnctcttgtgcacatctagtggnt

SEQ ID NO: 254 - DNA, 87 bp, Artificial Sequence
  Synthetic Probe
  modified_base (2)..(2): DNP phosphoramidite base
  misc_feature (2)..(2): n is a, c, g, or t
  modified_base (23)..(23): DNP phosphoramidite base
  misc_feature (23)..(23): n is a, c, g, or t
  modified_base (44)..(44): DNP phosphoramidite base
  misc_feature (44)..(44): n is a, c, g, or t
  modified_base (65)..(65): DNP phosphoramidite base
  misc_feature (65)..(65): n is a, c, g, or t
  modified_base (86)..(86): DNP phosphoramidite base
  misc_feature (86)..(86): n is a, c, g, or t
tnctgcagtgagctcataaaganagggggaacatttccaatccnatggggactggagggataatnctcatttgctgcctacctgtnt

SEQ ID NO: 255 - DNA, 87 bp, Artificial Sequence
  Synthetic Probe
  modified_base (2)..(2): DNP phosphoramidite base
  misc_feature (2)..(2): n is a, c, g, or t
  modified_base (23)..(23): DNP phosphoramidite base
  misc_feature (23)..(23): n is a, c, g, or t
  modified_base (44)..(44): DNP phosphoramidite base
  misc_feature (44)..(44): n is a, c, g, or t
  modified_base (65)..(65): DNP phosphoramidite base
  misc_feature (65)..(65): n is a, c, g, or t
  modified_base (86)..(86): DNP phosphoramidite base
  misc_feature (86)..(86): n is a, c, g, or t
tnattcacctgttggaaaggcangcatatccaccaccagaattntctggccactgcccagtccanctcagaattatgaagttgtcnt

SEQ ID NO: 256 - DNA, 87 bp, Artificial Sequence
  Synthetic Probe
  modified_base (2)..(2): DNP phosphoramidite base
  misc_feature (2)..(2): n is a, c, g, or t
  modified_base (23)..(23): DNP phosphoramidite base
  misc_feature (23)..(23): n is a, c, g, or t
  modified_base (44)..(44): DNP phosphoramidite base
  misc_feature (44)..(44): n is a, c, g, or t
  modified_base (65)..(65): DNP phosphoramidite base
  misc_feature (65)..(65): n is a, c, g, or t
  modified_base (86)..(86): DNP phosphoramidite base
  misc_feature (86)..(86): n is a, c, g, or t
tnatcttaagccaaacaaatgcnagcactaatggtagaaacacnaggctccatcaagcttcctanaaagcttactgcattttaaant

SEQ ID NO: 257 - DNA, 87 bp, Artificial Sequence
  Synthetic Probe
  modified_base (2)..(2): DNP phosphoramidite base
  misc_feature (2)..(2): n is a, c, g, or t
  modified_base (23)..(23): DNP phosphoramidite base
  misc_feature (23)..(23): n is a, c, g, or t
  modified_base (44)..(44): DNP phosphoramidite base
  misc_feature (44)..(44): n is a, c, g, or t
  modified_base (65)..(65): DNP phosphoramidite base
  misc_feature (65)..(65): n is a, c, g, or t
  modified_base (86)..(86): DNP phosphoramidite base
  misc_feature (86)..(86): n is a, c, g, or t
tnaagagcctgtgccaggaagcnaccaacctcagaaggtggggncactccatggttaacacttcntttgggacccgaggatctagnt

SEQ ID NO: 258 - DNA, 87 bp, Artificial Sequence
  Synthetic Probe
  modified_base (2)..(2): DNP phosphoramidite base
  misc_feature (2)..(2): n is a, c, g, or t
  modified_base (23)..(23): DNP phosphoramidite base
  misc_feature (23)..(23): n is a, c, g, or t
  modified_base (44)..(44): DNP phosphoramidite base
  misc_feature (44)..(44): n is a, c, g, or t
  modified_base (65)..(65): DNP phosphoramidite base
  misc_feature (65)..(65): n is a, c, g, or t
  modified_base (86)..(86): DNP phosphoramidite base
  misc_feature (86)..(86): n is a, c, g, or t
tnactttagttgctctgtagcgntaaggtatcccagaggtttanttgtaagatatccttggaatnccatgggtgaagaggcttatnt

SEQ ID NO: 259 - DNA, 87 bp, Artificial Sequence
  Synthetic Probe
  modified_base (2)..(2): DNP phosphoramidite base
  misc_feature (2)..(2): n is a, c, g, or t
  modified_base (23)..(23): DNP phosphoramidite base
  misc_feature (23)..(23): n is a, c, g, or t
  modified_base (44)..(44): DNP phosphoramidite base
  misc_feature (44)..(44): n is a, c, g, or t
  modified_base (65)..(65): DNP phosphoramidite base
  misc_feature (65)..(65): n is a, c, g, or t
  modified_base (86)..(86): DNP phosphoramidite base
  misc_feature (86)..(86): n is a, c, g, or t
tnttattgtaaaagtaacaggcnttctgtttcagtggtatggtnacactagacacccactctaanctacagacaactaaaacttcnt

SEQ ID NO: 260 - DNA, 87 bp, Artificial Sequence
  Synthetic Probe
  modified_base (2)..(2): DNP phosphoramidite base
  misc_feature (2)..(2): n is a, c, g, or t
  modified_base (23)..(23): DNP phosphoramidite base
  misc_feature (23)..(23): n is a, c, g, or t
  modified_base (44)..(44): DNP phosphoramidite base
  misc_feature (44)..(44): n is a, c, g, or t
  modified_base (65)..(65): DNP phosphoramidite base
  misc_feature (65)..(65): n is a, c, g, or t
  modified_base (86)..(86): DNP phosphoramidite base
  misc_feature (86)..(86): n is a, c, g, or t
tnaccaccttctattctcttcanctgcagataggactgactttncccacccagcccaagtacgancacatggctacaggcagcttnt

SEQ ID NO: 261 - DNA, 87 bp, Artificial Sequence
  Synthetic Probe
  modified_base (2)..(2): DNP phosphoramidite base
  misc_feature (2)..(2): n is a, c, g, or t
  modified_base (23)..(23): DNP phosphoramidite base
  misc_feature (23)..(23): n is a, c, g, or t
  modified_base (44)..(44): DNP phosphoramidite base
  misc_feature (44)..(44): n is a, c, g, or t
  modified_base (65)..(65): DNP phosphoramidite base
  misc_feature (65)..(65): n is a, c, g, or t
  modified_base (86)..(86): DNP phosphoramidite base
  misc_feature (86)..(86): n is a, c, g, or t
tnctggcttagcctgaggcaaanctcaattacaaacagcctganacacactcacctgggtgtgantccccacagaagccagcagcnt

SEQ ID NO: 262 - DNA, 87 bp, Artificial Sequence
  Synthetic Probe
  modified_base (2)..(2): DNP phosphoramidite base
  misc_feature (2)..(2): n is a, c, g, or t
  modified_base (23)..(23): DNP phosphoramidite base
  misc_feature (23)..(23): n is a, c, g, or t
  modified_base (44)..(44): DNP phosphoramidite base
  misc_feature (44)..(44): n is a, c, g, or t
  modified_base (65)..(65): DNP phosphoramidite base
  misc_feature (65)..(65): n is a, c, g, or t
  modified_base (86)..(86): DNP phosphoramidite base
  misc_feature (86)..(86): n is a, c, g, or t
tnatccaaactcctgtatctcanctctcctcatgctccctctcnaaatacccctgagtgcagttnaagtgataatggaagtgagtnt

SEQ ID NO: 263 - DNA, 87 bp, Artificial Sequence
  Synthetic Probe
  modified_base (2)..(2): DNP phosphoramidite base
  misc_feature (2)..(2): n is a, c, g, or t
  modified_base (23)..(23): DNP phosphoramidite base
  misc_feature (23)..(23): n is a, c, g, or t
  modified_base (44)..(44): DNP phosphoramidite base
  misc_feature (44)..(44): n is a, c, g, or t
  modified_base (65)..(65): DNP phosphoramidite base
  misc_feature (65)..(65): n is a, c, g, or t
  modified_base (86)..(86): DNP phosphoramidite base
  misc_feature (86)..(86): n is a, c, g, or t
tnaacatgatgaccattaccatnctttaatgttttccaattctncagctcccaactccactagangccaataataaatcatgcatnt

SEQ ID NO: 264 - DNA, 87 bp, Artificial Sequence
  Synthetic Probe
  modified_base (2)..(2): DNP phosphoramidite base
  misc_feature (2)..(2): n is a, c, g, or t
  modified_base (23)..(23): DNP phosphoramidite base
  misc_feature (23)..(23): n is a, c, g, or t
  modified_base (44)..(44): DNP phosphoramidite base
  misc_feature (44)..(44): n is a, c, g, or t
  modified_base (65)..(65): DNP phosphoramidite base
  misc_feature (65)..(65): n is a, c, g, or t
  modified_base (86)..(86): DNP phosphoramidite base
  misc_feature (86)..(86): n is a, c, g, or t
tncctcaggcatcactcttctcntccattttggttcccacattngactgccccatgccccaaccnctagggcaggcaaaaggggtnt

SEQ ID NO: 265 - DNA, 87 bp, Artificial Sequence
  Synthetic Probe
  modified_base (2)..(2): DNP phosphoramidite base
  misc_feature (2)..(2): n is a, c, g, or t
  modified_base (23)..(23): DNP phosphoramidite base
  misc_feature (23)..(23): n is a, c, g, or t
  modified_base (44)..(44): DNP phosphoramidite base
  misc_feature (44)..(44): n is a, c, g, or t
  modified_base (65)..(65): DNP phosphoramidite base
  misc_feature (65)..(65): n is a, c, g, or t
  modified_base (86)..(86): DNP phosphoramidite base
  misc_feature (86)..(86): n is a, c, g, or t
tnccccctttaaggagaagagtnagggtgggtaataacaatagnctaaaaggctagagtttaggngaggtgtagagcgtatacccnt

SEQ ID NO: 266 - DNA, 87 bp, Artificial Sequence
  Synthetic Probe
  modified_base (2)..(2): DNP phosphoramidite base
  misc_feature (2)..(2): n is a, c, g, or t
  modified_base (23)..(23): DNP phosphoramidite base
  misc_feature (23)..(23): n is a, c, g, or t
  modified_base (44)..(44): DNP phosphoramidite base
  misc_feature (44)..(44): n is a, c, g, or t
  modified_base (65)..(65): DNP phosphoramidite base
  misc_feature (65)..(65): n is a, c, g, or t
  modified_base (86)..(86): DNP phosphoramidite base
  misc_feature (86)..(86): n is a, c, g, or t
tntcagagaaaaaggaaacactncactccccaagctcgagatgntcccctcttcttgcaactgcnttgttcagccagattcccacnt

SEQ ID NO: 267 - DNA, 87 bp, Artificial Sequence
  Synthetic Probe
  modified_base (2)..(2): DNP phosphoramidite base
  misc_feature (2)..(2): n is a, c, g, or t
  modified_base (23)..(23): DNP phosphoramidite base
  misc_feature (23)..(23): n is a, c, g, or t
  modified_base (44)..(44): DNP phosphoramidite base
  misc_feature (44)..(44): n is a, c, g, or t
  modified_base (65)..(65): DNP phosphoramidite base
  misc_feature (65)..(65): n is a, c, g, or t
  modified_base (86)..(86): DNP phosphoramidite base
  misc_feature (86)..(86): n is a, c, g, or t
tnaagggctgcatgaggccaggnggtctgagaaaatggctcccntttcacctgagtcatgccccntgcgggcgcaagaaaggtgant

SEQ ID NO: 268 - DNA, 87 bp, Artificial Sequence
  Synthetic Probe
  modified_base (2)..(2): DNP phosphoramidite base
  misc_feature (2)..(2): n is a, c, g, or t
  modified_base (23)..(23): DNP phosphoramidite base
  misc_feature (23)..(23): n is a, c, g, or t
  modified_base (44)..(44): DNP phosphoramidite base
  misc_feature (44)..(44): n is a, c, g, or t
  modified_base (65)..(65): DNP phosphoramidite base
  misc_feature (65)..(65): n is a, c, g, or t
  modified_base (86)..(86): DNP phosphoramidite base
  misc_feature (86)..(86): n is a, c, g, or t
tnactcctggcaaggcggagcgngtcagttctagatgatcaagnaaggacctgcgtggtttgctngcagccgaagctgcttctctnt

SEQ ID NO: 269 - DNA, 87 bp, Artificial Sequence
  Synthetic Probe
  modified_base (2)..(2): DNP phosphoramidite base
  misc_feature (2)..(2): n is a, c, g, or t
  modified_base (23)..(23): DNP phosphoramidite base
  misc_feature (23)..(23): n is a, c, g, or t
  modified_base (44)..(44): DNP phosphoramidite base
  misc_feature (44)..(44): n is a, c, g, or t
  modified_base (65)..(65): DNP phosphoramidite base
  misc_feature (65)..(65): n is a, c, g, or t
  modified_base (86)..(86): DNP phosphoramidite base
  misc_feature (86)..(86): n is a, c, g, or t
tngccacctcatcacctgtgttntccgcctcggcagccgggagncatcgccatagagacctcaancgcttgtggaaagttctgagnt

SEQ ID NO: 270 - DNA, 87 bp, Artificial Sequence
  Synthetic Probe
  modified_base (2)..(2): DNP phosphoramidite base
  misc_feature (2)..(2): n is a, c, g, or t
  modified_base (23)..(23): DNP phosphoramidite base
  misc_feature (23)..(23): n is a, c, g, or t
  modified_base (44)..(44): DNP phosphoramidite base
  misc_feature (44)..(44): n is a, c, g, or t
  modified_base (65)..(65): DNP phosphoramidite base
  misc_feature (65)..(65): n is a, c, g, or t
  modified_base (86)..(86): DNP phosphoramidite base
  misc_feature (86)..(86): n is a, c, g, or t
tnggaaatgttttgccctggccngcgtttccttttccacgtatntgtctgttagagtgcaagctngaaataatgggttttctagtnt

SEQ ID NO: 271 - DNA, 87 bp, Artificial Sequence
  Synthetic Probe
  modified_base (2)..(2): DNP phosphoramidite base
  misc_feature (2)..(2): n is a, c, g, or t
  modified_base (23)..(23): DNP phosphoramidite base
  misc_feature (23)..(23): n is a, c, g, or t
  modified_base (44)..(44): DNP phosphoramidite base
  misc_feature (44)..(44): n is a, c, g, or t
  modified_base (65)..(65): DNP phosphoramidite base
  misc_feature (65)..(65): n is a, c, g, or t
  modified_base (86)..(86): DNP phosphoramidite base
  misc_feature (86)..(86): n is a, c, g, or t
tnttccttttcagacttatttgntgctaataaatttcccctgcnaacttggtaactctcttcganagaagtgtgtgatttgctgcnt

SEQ ID NO: 272 - DNA, 87 bp, Artificial Sequence
  Synthetic Probe
  modified_base (2)..(2): DNP phosphoramidite base
  misc_feature (2)..(2): n is a, c, g, or t
  modified_base (23)..(23): DNP phosphoramidite base
  misc_feature (23)..(23): n is a, c, g, or t
  modified_base (44)..(44): DNP phosphoramidite base
  misc_feature (44)..(44): n is a, c, g, or t
  modified_base (65)..(65): DNP phosphoramidite base
  misc_feature (65)..(65): n is a, c, g, or t
  modified_base (86)..(86): DNP phosphoramidite base
  misc_feature (86)..(86): n is a, c, g, or t
tntttttagtccatgaggatctntgtcacacaaaacttgcaccntgcctttaccagagcctcctnggtcattcttatcttatgatnt

SEQ ID NO: 273 - DNA, 87 bp, Artificial Sequence
  Synthetic Probe
  modified_base (2)..(2): DNP phosphoramidite base
  misc_feature (2)..(2): n is a, c, g, or t
  modified_base (23)..(23): DNP phosphoramidite base
  misc_feature (23)..(23): n is a, c, g, or t
  modified_base (44)..(44): DNP phosphoramidite base
  misc_feature (44)..(44): n is a, c, g, or t
  modified_base (65)..(65): DNP phosphoramidite base
  misc_feature (65)..(65): n is a, c, g, or t
  modified_base (86)..(86): DNP phosphoramidite base
  misc_feature (86)..(86): n is a, c, g, or t
tncctaacgccccttcacttgantaaccaactggcctctctgtnccaccaagtaccacactcacntccactcttggcctgaaagcnt

SEQ ID NO: 274 - DNA, 87 bp, Artificial Sequence
  Synthetic Probe
  modified_base (2)..(2): DNP phosphoramidite base
  misc_feature (2)..(2): n is a, c, g, or t
  modified_base (23)..(23): DNP phosphoramidite base
  misc_feature (23)..(23): n is a, c, g, or t
  modified_base (44)..(44): DNP phosphoramidite base
  misc_feature (44)..(44): n is a, c, g, or t
  modified_base (65)..(65): DNP phosphoramidite base
  misc_feature (65)..(65): n is a, c, g, or t
  modified_base (86)..(86): DNP phosphoramidite base
  misc_feature (86)..(86): n is a, c, g, or t
tntaaagtggtcggtgtgagttngcaatcccaatgtgtgcattncaggaacacagcaaggctaangccacttagaatgcagtgatnt

SEQ ID NO: 275 - DNA, 87 bp, Artificial Sequence
  Synthetic Probe
  modified_base (2)..(2): DNP phosphoramidite base
  misc_feature (2)..(2): n is a, c, g, or t
  modified_base (23)..(23): DNP phosphoramidite base
  misc_feature (23)..(23): n is a, c, g, or t
  modified_base (44)..(44): DNP phosphoramidite base
  misc_feature (44)..(44): n is a, c, g, or t
  modified_base (65)..(65): DNP phosphoramidite base
  misc_feature (65)..(65): n is a, c, g, or t
  modified_base (86)..(86): DNP phosphoramidite base
  misc_feature (86)..(86): n is a, c, g, or t
tnactaggctcacatcagagaanaccagcgtcacctctgtgcangatgcttttcctgctctgagntgataatactagtggctactnt

SEQ ID NO: 276 - DNA, 87 bp, Artificial Sequence
  Synthetic Probe
  modified_base (2)..(2): DNP phosphoramidite base
  misc_feature (2)..(2): n is a, c, g, or t
  modified_base (23)..(23): DNP phosphoramidite base
  misc_feature (23)..(23): n is a, c, g, or t
  modified_base (44)..(44): DNP phosphoramidite base
  misc_feature (44)..(44): n is a, c, g, or t
  modified_base (65)..(65): DNP phosphoramidite base
  misc_feature (65)..(65): n is a, c, g, or t
  modified_base (86)..(86): DNP phosphoramidite base
  misc_feature (86)..(86): n is a, c, g, or t
tntacaaatgttaattcactttnttgggctttttcaagagcagnagagctacactgacttacacnaagctcacaagagccagagant

SEQ ID NO: 277 - DNA, 87 bp, Artificial Sequence
  Synthetic Probe
  modified_base (2)..(2): DNP phosphoramidite base
  misc_feature (2)..(2): n is a, c, g, or t
  modified_base (23)..(23): DNP phosphoramidite base
  misc_feature (23)..(23): n is a, c, g, or t
  modified_base (44)..(44): DNP phosphoramidite base
  misc_feature (44)..(44): n is a, c, g, or t
  modified_base (65)..(65): DNP phosphoramidite base
  misc_feature (65)..(65): n is a, c, g, or t
  modified_base (86)..(86): DNP phosphoramidite base
  misc_feature (86)..(86): n is a, c, g, or t
tncagttcaacagccctcaatanctttgtcttgtttgaaatccnactgtgatcaagtctttaccnaggtggcacttgctacagatnt

SEQ ID NO: 278 - DNA, 87 bp, Artificial Sequence
  Synthetic Probe
  modified_base (2)..(2): DNP phosphoramidite base
  misc_feature (2)..(2): n is a, c, g, or t
  modified_base (23)..(23): DNP phosphoramidite base
  misc_feature (23)..(23): n is a, c, g, or t
  modified_base (44)..(44): DNP phosphoramidite base
  misc_feature (44)..(44): n is a, c, g, or t
  modified_base (65)..(65): DNP phosphoramidite base
  misc_feature (65)..(65): n is a, c, g, or t
  modified_base (86)..(86): DNP phosphoramidite base
  misc_feature (86)..(86): n is a, c, g, or t
tncctttgagatccaataaagtngtatgaaaccgtaagtttgcnttgcaggaagcaggtatcttnctctcctggagtgacaataant

SEQ ID NO: 279 - DNA, 87 bp, Artificial Sequence
  Synthetic Probe
  modified_base (2)..(2): DNP phosphoramidite base
  misc_feature (2)..(2): n is a, c, g, or t
  modified_base (23)..(23): DNP phosphoramidite base
  misc_feature (23)..(23): n is a, c, g, or t
  modified_base (44)..(44): DNP phosphoramidite base
  misc_feature (44)..(44): n is a, c, g, or t
  modified_base (65)..(65): DNP phosphoramidite base
  misc_feature (65)..(65): n is a, c, g, or t
  modified_base (86)..(86): DNP phosphoramidite base
  misc_feature (86)..(86): n is a, c, g, or t
tnctgctgagaggcagcgctcancccagaaagaagagaattcanacaactgcatgcccaacccanactttccctagacacataatnt

SEQ ID NO: 280 - DNA, 87 bp, Artificial Sequence
  Synthetic Probe
  modified_base (2)..(2): DNP phosphoramidite base
  misc_feature (2)..(2): n is a, c, g, or t
  modified_base (23)..(23): DNP phosphoramidite base
  misc_feature (23)..(23): n is a, c, g, or t
  modified_base (44)..(44): DNP phosphoramidite base
  misc_feature (44)..(44): n is a, c, g, or t
  modified_base (65)..(65): DNP phosphoramidite base
  misc_feature (65)..(65): n is a, c, g, or t
  modified_base (86)..(86): DNP phosphoramidite base
  misc_feature (86)..(86): n is a, c, g, or t
tncttgggcttattcttttaagntgtcttattctcaaggcttgnaaggagccttagccctttgcngccaggaatgttgctggccant

SEQ ID NO: 281 - DNA, 87 bp, Artificial Sequence
  Synthetic Probe
  modified_base (2)..(2): DNP phosphoramidite base
  misc_feature (2)..(2): n is a, c, g, or t
  modified_base (23)..(23): DNP phosphoramidite base
  misc_feature (23)..(23): n is a, c, g, or t
  modified_base (44)..(44): DNP phosphoramidite base
  misc_feature (44)..(44): n is a, c, g, or t
  modified_base (65)..(65): DNP phosphoramidite base
  misc_feature (65)..(65): n is a, c, g, or t
  modified_base (86)..(86): DNP phosphoramidite base
  misc_feature (86)..(86): n is a, c, g, or t
tntattctgtattcaccactaanaggcagcaacttccaacaaanttggggtaggcttgaaagatntaaaccattaggctatccctnt

SEQ ID NO: 282 - DNA, 87 bp, Artificial Sequence
  Synthetic Probe
  modified_base (2)..(2): DNP phosphoramidite base
  misc_feature (2)..(2): n is a, c, g, or t
  modified_base (23)..(23): DNP phosphoramidite base
  misc_feature (23)..(23): n is a, c, g, or t
  modified_base (44)..(44): DNP phosphoramidite base
  misc_feature (44)..(44): n is a, c, g, or t
  modified_base (65)..(65): DNP phosphoramidite base
  misc_feature (65)..(65): n is a, c, g, or t
  modified_base (86)..(86): DNP phosphoramidite base
  misc_feature (86)..(86): n is a, c, g, or t
tngtggatctatactcccatctncagttggttcatttggggganggtttcaacatgcttgtgcangagaaacgcaaacaattcctnt

SEQ ID NO: 283 - DNA, 87 bp, Artificial Sequence
  Synthetic Probe
  modified_base (2)..(2): DNP phosphoramidite base
  misc_feature (2)..(2): n is a, c, g, or t
  modified_base (23)..(23): DNP phosphoramidite base
  misc_feature (23)..(23): n is a, c, g, or t
  modified_base (44)..(44): DNP phosphoramidite base
  misc_feature (44)..(44): n is a, c, g, or t
  modified_base (65)..(65): DNP phosphoramidite base
  misc_feature (65)..(65): n is a, c, g, or t
  modified_base (86)..(86): DNP phosphoramidite base
  misc_feature (86)..(86): n is a, c, g, or t
tntatataagaatatgtaagctngtccttttcttcctcatcacncccaccatcctgtaccatttnttaggaaagatcattgacagnt

SEQ ID NO: 284 - DNA, 87 bp, Artificial Sequence
  Synthetic Probe
  modified_base (2)..(2): DNP phosphoramidite base
  misc_feature (2)..(2): n is a, c, g, or t
  modified_base (23)..(23): DNP phosphoramidite base
  misc_feature (23)..(23): n is a, c, g, or t
  modified_base (44)..(44): DNP phosphoramidite base
  misc_feature (44)..(44): n is a, c, g, or t
  modified_base (65)..(65): DNP phosphoramidite base
  misc_feature (65)..(65): n is a, c, g, or t
  modified_base (86)..(86): DNP phosphoramidite base
  misc_feature (86)..(86): n is a, c, g, or t
tnactttacagtgaagagtcctncctcccatccctgttgctcangctacccaataaccctccacnagagacaacggtattaccagnt

SEQ ID NO: 285 - DNA, 87 bp, Artificial Sequence
  Synthetic Probe
  modified_base (2)..(2): DNP phosphoramidite base
  misc_feature (2)..(2): n is a, c, g, or t
  modified_base (23)..(23): DNP phosphoramidite base
  misc_feature (23)..(23): n is a, c, g, or t
  modified_base (44)..(44): DNP phosphoramidite base
  misc_feature (44)..(44): n is a, c, g, or t
  modified_base (65)..(65): DNP phosphoramidite base
  misc_feature (65)..(65): n is a, c, g, or t
  modified_base (86)..(86): DNP phosphoramidite base
  misc_feature (86)..(86): n is a, c, g, or t
tnactgacctcgacaaaatagtntcagccttccatctctgaatnggctcctctccagttgaccanatgccttttcttgtgtaattnt

SEQ ID NO: 286 - DNA, 87 bp, Artificial Sequence
  Synthetic Probe
  modified_base (2)..(2): DNP phosphoramidite base
  misc_feature (2)..(2): n is a, c, g, or t
  modified_base (23)..(23): DNP phosphoramidite base
  misc_feature (23)..(23): n is a, c, g, or t
  modified_base (44)..(44): DNP phosphoramidite base
  misc_feature (44)..(44): n is a, c, g, or t
  modified_base (65)..(65): DNP phosphoramidite base
  misc_feature (65)..(65): n is a, c, g, or t
  modified_base (86)..(86): DNP phosphoramidite base
  misc_feature (86)..(86): n is a, c, g, or t
tncccctgcttcttccaaacctntatgtttatctgttaaaccangtcagcacgataaggtgtgcntaggcttagcactgcaaagant

SEQ ID NO: 287 - DNA, 87 bp, Artificial Sequence
  Synthetic Probe
  modified_base (2)..(2): DNP phosphoramidite base
  misc_feature (2)..(2): n is a, c, g, or t
  modified_base (23)..(23): DNP phosphoramidite base
  misc_feature (23)..(23): n is a, c, g, or t
  modified_base (44)..(44): DNP phosphoramidite base
  misc_feature (44)..(44): n is a, c, g, or t
  modified_base (65)..(65): DNP phosphoramidite base
  misc_feature (65)..(65): n is a, c, g, or t
  modified_base (86)..(86): DNP phosphoramidite base
  misc_feature (86)..(86): n is a, c, g, or t
tncagaaaagtttttgccagacncagagagtacacaggcagcanggcctctggattatcctcgancacattcagcacataagcctnt

SEQ ID NO: 288 - DNA, 87 bp, Artificial Sequence
  Synthetic Probe
  modified_base (2)..(2): DNP phosphoramidite base
  misc_feature (2)..(2): n is a, c, g, or t
  modified_base (23)..(23): DNP phosphoramidite base
  misc_feature (23)..(23): n is a, c, g, or t
  modified_base (44)..(44): DNP phosphoramidite base
  misc_feature (44)..(44): n is a, c, g, or t
  modified_base (65)..(65): DNP phosphoramidite base
  misc_feature (65)..(65): n is a, c, g, or t
  modified_base (86)..(86): DNP phosphoramidite base
  misc_feature (86)..(86): n is a, c, g, or t
tnttctgccttcttttgcagaanaaactgacccattcgcatacntcataaagatggtcatgagtngaagtacccatcaacttaccnt

SEQ ID NO: 289 - DNA, 87 bp, Artificial Sequence
  Synthetic Probe
  modified_base (2)..(2): DNP phosphoramidite base
  misc_feature (2)..(2): n is a, c, g, or t
  modified_base (23)..(23): DNP phosphoramidite base
  misc_feature (23)..(23): n is a, c, g, or t
  modified_base (44)..(44): DNP phosphoramidite base
  misc_feature (44)..(44): n is a, c, g, or t
  modified_base (65)..(65): DNP phosphoramidite base
  misc_feature (65)..(65): n is a, c, g, or t
  modified_base (86)..(86): DNP phosphoramidite base
  misc_feature (86)..(86): n is a, c, g, or t
tnacttgcctcgctttgcagccnaggtgggcaaaaacaatcaancaacttcatgggttaccccantctgattcgtccaagctgaant

SEQ ID NO: 290 - DNA, 87 bp, Artificial Sequence
  Synthetic Probe
  modified_base (2)..(2): DNP phosphoramidite base
  misc_feature (2)..(2): n is a, c, g, or t
  modified_base (23)..(23): DNP phosphoramidite base
  misc_feature (23)..(23): n is a, c, g, or t
  modified_base (44)..(44): DNP phosphoramidite base
  misc_feature (44)..(44): n is a, c, g, or t
  modified_base (65)..(65): DNP phosphoramidite base
  misc_feature (65)..(65): n is a, c, g, or t
  modified_base (86)..(86): DNP phosphoramidite base
  misc_feature (86)..(86): n is a, c, g, or t
tncttcactaaagtataaattcnaggaaataggaagaacccagngacagataatccacccacaancttcacccctcaggctctatnt

SEQ ID NO: 291 - DNA, 87 bp, Artificial Sequence
  Synthetic Probe
  modified_base (2)..(2): DNP phosphoramidite base
  misc_feature (2)..(2): n is a, c, g, or t
  modified_base (23)..(23): DNP phosphoramidite base
  misc_feature (23)..(23): n is a, c, g, or t
  modified_base (44)..(44): DNP phosphoramidite base
  misc_feature (44)..(44): n is a, c, g, or t
  modified_base (65)..(65): DNP phosphoramidite base
  misc_feature (65)..(65): n is a, c, g, or t
  modified_base (86)..(86): DNP phosphoramidite base
  misc_feature (86)..(86): n is a, c, g, or t
tnccagcatcatcataggtcaangaatggaccaaaccaccactnctaggaccagccacctctgcntggaaagaccgcagcagcacnt

SEQ ID NO: 292 - DNA, 87 bp, Artificial Sequence
  Synthetic Probe
  modified_base (2)..(2): DNP phosphoramidite base
  misc_feature (2)..(2): n is a, c, g, or t
  modified_base (23)..(23): DNP phosphoramidite base
  misc_feature (23)..(23): n is a, c, g, or t
  modified_base (44)..(44): DNP phosphoramidite base
  misc_feature (44)..(44): n is a, c, g, or t
  modified_base (65)..(65): DNP phosphoramidite base
  misc_feature (65)..(65): n is a, c, g, or t
  modified_base (86)..(86): DNP phosphoramidite base
  misc_feature (86)..(86): n is a, c, g, or t
tngttggacttactgcagagggnctgctcaggctgtgcattgcnaatggtacctccaagaagtanccattcacacaagctagtaant

SEQ ID NO: 293 - DNA, 87 bp, Artificial Sequence
  Synthetic Probe
  modified_base (2)..(2): DNP phosphoramidite base
  misc_feature (2)..(2): n is a, c, g, or t
  modified_base (23)..(23): DNP phosphoramidite base
  misc_feature (23)..(23): n is a, c, g, or t
  modified_base (44)..(44): DNP phosphoramidite base
  misc_feature (44)..(44): n is a, c, g, or t
  modified_base (65)..(65): DNP phosphoramidite base
  misc_feature (65)..(65): n is a, c, g, or t
  modified_base (86)..(86): DNP phosphoramidite base
  misc_feature (86)..(86): n is a, c, g, or t
tnatggaaacctggtcaagtaancaaaatagctctattctgctntgacatccatagcttccctcnaaattaagggagcagcaggcnt

SEQ ID NO: 294 - DNA, 87 bp, Artificial Sequence
  Synthetic Probe
  modified_base (2)..(2): DNP phosphoramidite base
  misc_feature (2)..(2): n is a, c, g, or t
  modified_base (23)..(23): DNP phosphoramidite base
  misc_feature (23)..(23): n is a, c, g, or t
  modified_base (44)..(44): DNP phosphoramidite base
  misc_feature (44)..(44): n is a, c, g, or t
  modified_base (65)..(65): DNP phosphoramidite base
  misc_feature (65)..(65): n is a, c, g, or t
  modified_base (86)..(86): DNP phosphoramidite base
  misc_feature (86)..(86): n is a, c, g, or t
tncaatagtgaggtagccggtgntggtgctgaccacagacgctngcacagcccacaaagcaggtngactcaggaatccacaagggnt

SEQ ID NO: 295 - DNA, 87 bp, Artificial Sequence
  Synthetic Probe
  modified_base (2)..(2): DNP phosphoramidite base
  misc_feature (2)..(2): n is a, c, g, or t
  modified_base (23)..(23): DNP phosphoramidite base
  misc_feature (23)..(23): n is a, c, g, or t
  modified_base (44)..(44): DNP phosphoramidite base
  misc_feature (44)..(44): n is a, c, g, or t
  modified_base (65)..(65): DNP phosphoramidite base
  misc_feature (65)..(65): n is a, c, g, or t
  modified_base (86)..(86): DNP phosphoramidite base
  misc_feature (86)..(86): n is a, c, g, or t
tnttgccaagggggctgaggacnatcaaatgacttcagttgccnttagtgcactcttatgggacnacacagaagagtctcacttcnt

SEQ ID NO: 296 - DNA, 87 bp, Artificial Sequence
  Synthetic Probe
  modified_base (2)..(2): DNP phosphoramidite base
  misc_feature (2)..(2): n is a, c, g, or t
  modified_base (23)..(23): DNP phosphoramidite base
  misc_feature (23)..(23): n is a, c, g, or t
  modified_base (44)..(44): DNP phosphoramidite base
  misc_feature (44)..(44): n is a, c, g, or t
  modified_base (65)..(65): DNP phosphoramidite base
  misc_feature (65)..(65): n is a, c, g, or t
  modified_base (86)..(86): DNP phosphoramidite base
  misc_feature (86)..(86): n is a, c, g, or t
tnaaacaaatgttctatctcttngcccttttgatttttcatccnttctgccagggatatcagttngaaggttgaagtggcagagant

SEQ ID NO: 297 - DNA, 87 bp, Artificial Sequence
  Synthetic Probe
  modified_base (2)..(2): DNP phosphoramidite base
  misc_feature (2)..(2): n is a, c, g, or t
  modified_base (23)..(23): DNP phosphoramidite base
  misc_feature (23)..(23): n is a, c, g, or t
  modified_base (44)..(44): DNP phosphoramidite base
  misc_feature (44)..(44): n is a, c, g, or t
  modified_base (65)..(65): DNP phosphoramidite base
  misc_feature (65)..(65): n is a, c, g, or t
  modified_base (86)..(86): DNP phosphoramidite base
  misc_feature (86)..(86): n is a, c, g, or t
tntcagcgcaaaaagggaatagntaaagggaggaagagacatgnagctgcaggattagaaagtgnggcatctggattaagtcaagnt

SEQ ID NO: 298 - DNA, 87 bp, Artificial Sequence
  Synthetic Probe
  modified_base (2)..(2): DNP phosphoramidite base
  misc_feature (2)..(2): n is a, c, g, or t
  modified_base (23)..(23): DNP phosphoramidite base
  misc_feature (23)..(23): n is a, c, g, or t
  modified_base (44)..(44): DNP phosphoramidite base
  misc_feature (44)..(44): n is a, c, g, or t
  modified_base (65)..(65): DNP phosphoramidite base
  misc_feature (65)..(65): n is a, c, g, or t
  modified_base (86)..(86): DNP phosphoramidite base
  misc_feature (86)..(86): n is a, c, g, or t
tncgtgcttcctaaaaccctccntacctttgtttcctcttttgngtcctcatgggtatttctcanatcagagaaatgagaaagttnt

SEQ ID NO: 299 - DNA, 87 bp, Artificial Sequence
  Synthetic Probe
  modified_base (2)..(2): DNP phosphoramidite base
  misc_feature (2)..(2): n is a, c, g, or t
  modified_base (23)..(23): DNP phosphoramidite base
  misc_feature (23)..(23): n is a, c, g, or t
  modified_base (44)..(44): DNP phosphoramidite base
  misc_feature (44)..(44): n is a, c, g, or t
  modified_base (65)..(65): DNP phosphoramidite base
  misc_feature (65)..(65): n is a, c, g, or t
  modified_base (86)..(86): DNP phosphoramidite base
  misc_feature (86)..(86): n is a, c, g, or t
tngcactgttaaactgatgggtntgctgaggttgattttcaggncattttgggggccatccctcnaaactgactacattccccttnt

SEQ ID NO: 300 - DNA, 87 bp, Artificial Sequence
  Synthetic Probe
  modified_base (2)..(2): DNP phosphoramidite base
  misc_feature (2)..(2): n is a, c, g, or t
  modified_base (23)..(23): DNP phosphoramidite base
  misc_feature (23)..(23): n is a, c, g, or t
  modified_base (44)..(44): DNP phosphoramidite base
  misc_feature (44)..(44): n is a, c, g, or t
  modified_base (65)..(65): DNP phosphoramidite base
  misc_feature (65)..(65): n is a, c, g, or t
  modified_base (86)..(86): DNP phosphoramidite base
  misc_feature (86)..(86): n is a, c, g, or t
tncttggggactcctacatcgtncaccataattccacctgtaanagctcacccggagcgtgcccnccaagccaggtcccatatggnt

SEQ ID NO: 301 - DNA, 87 bp, Artificial Sequence
  Synthetic Probe
  modified_base (2)..(2): DNP phosphoramidite base
  misc_feature (2)..(2): n is a, c, g, or t
  modified_base (23)..(23): DNP phosphoramidite base
  misc_feature (23)..(23): n is a, c, g, or t
  modified_base (44)..(44): DNP phosphoramidite base
  misc_feature (44)..(44): n is a, c, g, or t
  modified_base (65)..(65): DNP phosphoramidite base
  misc_feature (65)..(65): n is a, c, g, or t
  modified_base (86)..(86): DNP phosphoramidite base
  misc_feature (86)..(86): n is a, c, g, or t
tntgaagcttcaggagctgacanagttgagaacgctttctattncctgttcctggcctctttctnaagtcatagcacttctcttcnt

SEQ ID NO: 302 - DNA, 87 bp, Artificial Sequence
  Synthetic Probe
  modified_base (2)..(2): DNP phosphoramidite base
  misc_feature (2)..(2): n is a, c, g, or t
  modified_base (23)..(23): DNP phosphoramidite base
  misc_feature (23)..(23): n is a, c, g, or t
  modified_base (44)..(44): DNP phosphoramidite base
  misc_feature (44)..(44): n is a, c, g, or t
  modified_base (65)..(65): DNP phosphoramidite base
  misc_feature (65)..(65): n is a, c, g, or t
  modified_base (86)..(86): DNP phosphoramidite base
  misc_feature (86)..(86): n is a, c, g, or t
tnatttttcacgttgatttgtgngggagtccttagcaacactcnattaggagcaatgctgtgganggtttaggtggccctgaaatnt

SEQ ID NO: 303 - DNA, 87 bp, Artificial Sequence
  Synthetic Probe
  modified_base (2)..(2): DNP phosphoramidite base
  misc_feature (2)..(2): n is a, c, g, or t
  modified_base (23)..(23): DNP phosphoramidite base
  misc_feature (23)..(23): n is a, c, g, or t
  modified_base (44)..(44): DNP phosphoramidite base
  misc_feature (44)..(44): n is a, c, g, or t
  modified_base (65)..(65): DNP phosphoramidite base
  misc_feature (65)..(65): n is a, c, g, or t
  modified_base (86)..(86): DNP phosphoramidite base
  misc_feature (86)..(86): n is a, c, g, or t
tnccagagaggatcatcattccntcaggaagcagatctgctgantagagagctggagcttttctngctgagtcagggaactcatant

SEQ ID NO: 304 - DNA, 87 bp, Artificial Sequence
  Synthetic Probe
  modified_base (2)..(2): DNP phosphoramidite base
  misc_feature (2)..(2): n is a, c, g, or t
  modified_base (23)..(23): DNP phosphoramidite base
  misc_feature (23)..(23): n is a, c, g, or t
  modified_base (44)..(44): DNP phosphoramidite base
  misc_feature (44)..(44): n is a, c, g, or t
  modified_base (65)..(65): DNP phosphoramidite base
  misc_feature (65)..(65): n is a, c, g, or t
  modified_base (86)..(86): DNP phosphoramidite base
  misc_feature (86)..(86): n is a, c, g, or t
tnaggtaaaccttggaagaaaancaagggaatgaataagacggnggaagcgaggtgccccataanaaatgccttgcaaaaaataant

SEQ ID NO: 305 - DNA, 87 bp, Artificial Sequence
  Synthetic Probe
  modified_base (2)..(2): DNP phosphoramidite base
  misc_feature (2)..(2): n is a, c, g, or t
  modified_base (23)..(23): DNP phosphoramidite base
  misc_feature (23)..(23): n is a, c, g, or t
  modified_base (44)..(44): DNP phosphoramidite base
  misc_feature (44)..(44): n is a, c, g, or t
  modified_base (65)..(65): DNP phosphoramidite base
  misc_feature (65)..(65): n is a, c, g, or t
  modified_base (86)..(86): DNP phosphoramidite base
  misc_feature (86)..(86): n is a, c, g, or t
tngaatcttttatgtacagagcngtattttaagcctttctaacncaggagaatccttaagaagtngggggtgaagcagtttttgcnt

SEQ ID NO: 306 - DNA, 87 bp, Artificial Sequence
  Synthetic Probe
  modified_base (2)..(2): DNP phosphoramidite base
  misc_feature (2)..(2): n is a, c, g, or t
  modified_base (23)..(23): DNP phosphoramidite base
  misc_feature (23)..(23): n is a, c, g, or t
  modified_base (44)..(44): DNP phosphoramidite base
  misc_feature (44)..(44): n is a, c, g, or t
  modified_base (65)..(65): DNP phosphoramidite base
  misc_feature (65)..(65): n is a, c, g, or t
  modified_base (86)..(86): DNP phosphoramidite base
  misc_feature (86)..(86): n is a, c, g, or t
tncttctactttcctctctgtcnctccactttctctttactttnatttaagggaaagcaagatgntgttcctccaggggattgttnt

SEQ ID NO: 307 - DNA, 87 bp, Artificial Sequence
  Synthetic Probe
  modified_base (2)..(2): DNP phosphoramidite base
  misc_feature (2)..(2): n is a, c, g, or t
  modified_base (23)..(23): DNP phosphoramidite base
  misc_feature (23)..(23): n is a, c, g, or t
  modified_base (44)..(44): DNP phosphoramidite base
  misc_feature (44)..(44): n is a, c, g, or t
  modified_base (65)..(65): DNP phosphoramidite base
  misc_feature (65)..(65): n is a, c, g, or t
  modified_base (86)..(86): DNP phosphoramidite base
  misc_feature (86)..(86): n is a, c, g, or t
tngaattatcttcaaagcattangttaaaggggagtcaccagtnttagggggctgatcagccagncgaatgctctgctctctgttnt

SEQ ID NO: 308 - DNA, 87 bp, Artificial Sequence
  Synthetic Probe
  modified_base (2)..(2): DNP phosphoramidite base
  misc_feature (2)..(2): n is a, c, g, or t
  modified_base (23)..(23): DNP phosphoramidite base
  misc_feature (23)..(23): n is a, c, g, or t
  modified_base (44)..(44): DNP phosphoramidite base
  misc_feature (44)..(44): n is a, c, g, or t
  modified_base (65)..(65): DNP phosphoramidite base
  misc_feature (65)..(65): n is a, c, g, or t
  modified_base (86)..(86): DNP phosphoramidite base
  misc_feature (86)..(86): n is a, c, g, or t
tnatgtcccccattaaattgtcntcctgatatcagctttctgtnattctcccttggtggcacttnactcaaatcttacagagtcant

SEQ ID NO: 309 - DNA, 87 bp, Artificial Sequence
  Synthetic Probe
  modified_base (2)..(2): DNP phosphoramidite base
  misc_feature (2)..(2): n is a, c, g, or t
  modified_base (23)..(23): DNP phosphoramidite base
  misc_feature (23)..(23): n is a, c, g, or t
  modified_base (44)..(44): DNP phosphoramidite base
  misc_feature (44)..(44): n is a, c, g, or t
  modified_base (65)..(65): DNP phosphoramidite base
  misc_feature (65)..(65): n is a, c, g, or t
  modified_base (86)..(86): DNP phosphoramidite base
  misc_feature (86)..(86): n is a, c, g, or t
tngagggaatacttgcctgtganagcagcgttatctcgtcagcntctttgaagcttccttcaaantcttgcaatatgaaaacaaant

SEQ ID NO: 310 - DNA, 87 bp, Artificial Sequence
  Synthetic Probe
  modified_base (2)..(2): DNP phosphoramidite base
  misc_feature (2)..(2): n is a, c, g, or t
  modified_base (23)..(23): DNP phosphoramidite base
  misc_feature (23)..(23): n is a, c, g, or t
  modified_base (44)..(44): DNP phosphoramidite base
  misc_feature (44)..(44): n is a, c, g, or t
  modified_base (65)..(65): DNP phosphoramidite base
  misc_feature (65)..(65): n is a, c, g, or t
  modified_base (86)..(86): DNP phosphoramidite base
  misc_feature (86)..(86): n is a, c, g, or t
tncccatacgttcccagttgttngcatctctcgtcactctaagntgattctcaaactggggaacnctagtcatggaaattcatttnt

SEQ ID NO: 311 - DNA, 87 bp, Artificial Sequence
  Synthetic Probe
  modified_base (2)..(2): DNP phosphoramidite base
  misc_feature (2)..(2): n is a, c, g, or t
  modified_base (23)..(23): DNP phosphoramidite base
  misc_feature (23)..(23): n is a, c, g, or t
  modified_base (44)..(44): DNP phosphoramidite base
  misc_feature (44)..(44): n is a, c, g, or t
  modified_base (65)..(65): DNP phosphoramidite base
  misc_feature (65)..(65): n is a, c, g, or t
  modified_base (86)..(86): DNP phosphoramidite base
  misc_feature (86)..(86): n is a, c, g, or t
tnttttgaaacctctcagtcatnttgtagaactcctgactgttncactgagttccattctgaatnttacaccctcatgtaaatgant

SEQ ID NO: 312 - DNA, 87 bp, Artificial Sequence
  Synthetic Probe
  modified_base (2)..(2): DNP phosphoramidite base
  misc_feature (2)..(2): n is a, c, g, or t
  modified_base (23)..(23): DNP phosphoramidite base
  misc_feature (23)..(23): n is a, c, g, or t
  modified_base (44)..(44): DNP phosphoramidite base
  misc_feature (44)..(44): n is a, c, g, or t
  modified_base (65)..(65): DNP phosphoramidite base
  misc_feature (65)..(65): n is a, c, g, or t
  modified_base (86)..(86): DNP phosphoramidite base
  misc_feature (86)..(86): n is a, c, g, or t
tnccgaagccacacataatggtncttgggtaaaaaacatcctgnagttcaagaagctccaggacncactgaaacggaaaacaacant

SEQ ID NO: 313 - DNA, 87 bp, Artificial Sequence
  Synthetic Probe
  modified_base (2)..(2): DNP phosphoramidite base
  misc_feature (2)..(2): n is a, c, g, or t
  modified_base (23)..(23): DNP phosphoramidite base
  misc_feature (23)..(23): n is a, c, g, or t
  modified_base (44)..(44): DNP phosphoramidite base
  misc_feature (44)..(44): n is a, c, g, or t
  modified_base (65)..(65): DNP phosphoramidite base
  misc_feature (65)..(65): n is a, c, g, or t
  modified_base (86)..(86): DNP phosphoramidite base
  misc_feature (86)..(86): n is a, c, g, or t
tntgtgaaaagagaagtgtaagntcattcttatactaactggangttggggtgaagagtcctttngctctctgtcggcaaagctgnt

SEQ ID NO: 314 - DNA, 87 bp, Artificial Sequence
  Synthetic Probe
  modified_base (2)..(2): DNP phosphoramidite base
  misc_feature (2)..(2): n is a, c, g, or t
  modified_base (23)..(23): DNP phosphoramidite base
  misc_feature (23)..(23): n is a, c, g, or t
  modified_base (44)..(44): DNP phosphoramidite base
  misc_feature (44)..(44): n is a, c, g, or t
  modified_base (65)..(65): DNP phosphoramidite base
  misc_feature (65)..(65): n is a, c, g, or t
  modified_base (86)..(86): DNP phosphoramidite base
  misc_feature (86)..(86): n is a, c, g, or t
tntttaagaaaatgaaaaccagnccttactggtaatcagcctgntgatattcctaacagaacatngaacaatgtttccaaggaatnt

SEQ ID NO: 315 - DNA, 87 bp, Artificial Sequence
  Synthetic Probe
  modified_base (2)..(2): DNP phosphoramidite base
  misc_feature (2)..(2): n is a, c, g, or t
  modified_base (23)..(23): DNP phosphoramidite base
  misc_feature (23)..(23): n is a, c, g, or t
  modified_base (44)..(44): DNP phosphoramidite base
  misc_feature (44)..(44): n is a, c, g, or t
  modified_base (65)..(65): DNP phosphoramidite base
  misc_feature (65)..(65): n is a, c, g, or t
  modified_base (86)..(86): DNP phosphoramidite base
  misc_feature (86)..(86): n is a, c, g, or t
tnaaatatatccattttgcaggnttctgaagtattcatgacctnctctccctctaatgttgacancaagttacattctctgtgtcnt

SEQ ID NO: 316 - DNA, 87 bp, Artificial Sequence
  Synthetic Probe
  modified_base (2)..(2): DNP phosphoramidite base
  misc_feature (2)..(2): n is a, c, g, or t
  modified_base (23)..(23): DNP phosphoramidite base
  misc_feature (23)..(23): n is a, c, g, or t
  modified_base (44)..(44): DNP phosphoramidite base
  misc_feature (44)..(44): n is a, c, g, or t
  modified_base (65)..(65): DNP phosphoramidite base
  misc_feature (65)..(65): n is a, c, g, or t
  modified_base (86)..(86): DNP phosphoramidite base
  misc_feature (86)..(86): n is a, c, g, or t
tntagctgattcctacaagtccntccaagaaaacttccctaccnctgcatccccccacccagtanacatgtccaatccagaagacnt

SEQ ID NO: 317 - DNA, 87 bp, Artificial Sequence
  Synthetic Probe
  modified_base (2)..(2): DNP phosphoramidite base
  misc_feature (2)..(2): n is a, c, g, or t
  modified_base (23)..(23): DNP phosphoramidite base
  misc_feature (23)..(23): n is a, c, g, or t
  modified_base (44)..(44): DNP phosphoramidite base
  misc_feature (44)..(44): n is a, c, g, or t
  modified_base (65)..(65): DNP phosphoramidite base
  misc_feature (65)..(65): n is a, c, g, or t
  modified_base (86)..(86): DNP phosphoramidite base
  misc_feature (86)..(86): n is a, c, g, or t
tnagataaactctggatatgctntgatcatcaaaagcagctccngttggttaccatttagtatgntggcaccacttggtgtaagant

SEQ ID NO: 318 - DNA, 87 bp, Artificial Sequence
  Synthetic Probe
  modified_base (2)..(2): DNP phosphoramidite base
  misc_feature (2)..(2): n is a, c, g, or t
  modified_base (23)..(23): DNP phosphoramidite base
  misc_feature (23)..(23): n is a, c, g, or t
  modified_base (44)..(44): DNP phosphoramidite base
  misc_feature (44)..(44): n is a, c, g, or t
  modified_base (65)..(65): DNP phosphoramidite base
  misc_feature (65)..(65): n is a, c, g, or t
  modified_base (86)..(86): DNP phosphoramidite base
  misc_feature (86)..(86): n is a, c, g, or t
tnctggggaaatacttccttttncatcatctactggtgtcaatnttcccttgaagaggttcagcncttcggatctttgcaggtatnt

SEQ ID NO: 319 - DNA, 87 bp, Artificial Sequence
  Synthetic Probe
  modified_base (2)..(2): DNP phosphoramidite base
  misc_feature (2)..(2): n is a, c, g, or t
  modified_base (23)..(23): DNP phosphoramidite base
  misc_feature (23)..(23): n is a, c, g, or t
  modified_base (44)..(44): DNP phosphoramidite base
  misc_feature (44)..(44): n is a, c, g, or t
  modified_base (65)..(65): DNP phosphoramidite base
  misc_feature (65)..(65): n is a, c, g, or t
  modified_base (86)..(86): DNP phosphoramidite base
  misc_feature (86)..(86): n is a, c, g, or t
tnaaaattgagcactgagtgaangaggtttgacagataagcagnagatcctgggtcagcacagangtctagttggctctctgggant

SEQ ID NO: 320 - DNA, 87 bp, Artificial Sequence
  Synthetic Probe
  modified_base (2)..(2): DNP phosphoramidite base
  misc_feature (2)..(2): n is a, c, g, or t
  modified_base (23)..(23): DNP phosphoramidite base
  misc_feature (23)..(23): n is a, c, g, or t
  modified_base (44)..(44): DNP phosphoramidite base
  misc_feature (44)..(44): n is a, c, g, or t
  modified_base (65)..(65): DNP phosphoramidite base
  misc_feature (65)..(65): n is a, c, g, or t
  modified_base (86)..(86): DNP phosphoramidite base
  misc_feature (86)..(86): n is a, c, g, or t
tnataggctagatcttttacaanccaaaacactttccctgtccncattttaggaaagcaaattgntctgagtgtgttgactggaant

SEQ ID NO: 321 - DNA, 87 bp, Artificial Sequence
  Synthetic Probe
  modified_base (2)..(2): DNP phosphoramidite base
  misc_feature (2)..(2): n is a, c, g, or t
  modified_base (23)..(23): DNP phosphoramidite base
  misc_feature (23)..(23): n is a, c, g, or t
  modified_base (44)..(44): DNP phosphoramidite base
  misc_feature (44)..(44): n is a, c, g, or t
  modified_base (65)..(65): DNP phosphoramidite base
  misc_feature (65)..(65): n is a, c, g, or t
  modified_base (86)..(86): DNP phosphoramidite base
  misc_feature (86)..(86): n is a, c, g, or t
tngaaatgtataaatttagtccnttgtacctgtgtaagggtggncttggaattttggagctcagnatggctctgttgagtatgtgnt

SEQ ID NO: 322 - DNA, 87 bp, Artificial Sequence
  Synthetic Probe
  modified_base (2)..(2): DNP phosphoramidite base
  misc_feature (2)..(2): n is a, c, g, or t
  modified_base (23)..(23): DNP phosphoramidite base
  misc_feature (23)..(23): n is a, c, g, or t
  modified_base (44)..(44): DNP phosphoramidite base
  misc_feature (44)..(44): n is a, c, g, or t
  modified_base (65)..(65): DNP phosphoramidite base
  misc_feature (65)..(65): n is a, c, g, or t
  modified_base (86)..(86): DNP phosphoramidite base
  misc_feature (86)..(86): n is a, c, g, or t
tnaaactctacaatttagcactncttgagattttagggttttantcccagctatcaccctccctntggagcgggagatgaggaaant

SEQ ID NO: 323 - DNA, 87 bp, Artificial Sequence
  Synthetic Probe
  modified_base (2)..(2): DNP phosphoramidite base
  misc_feature (2)..(2): n is a, c, g, or t
  modified_base (23)..(23): DNP phosphoramidite base
  misc_feature (23)..(23): n is a, c, g, or t
  modified_base (44)..(44): DNP phosphoramidite base
  misc_feature (44)..(44): n is a, c, g, or t
  modified_base (65)..(65): DNP phosphoramidite base
  misc_feature (65)..(65): n is a, c, g, or t
  modified_base (86)..(86): DNP phosphoramidite base
  misc_feature (86)..(86): n is a, c, g, or t
tngacacaaggctatgtggtaanggcaaaatggtaagatggtgngcatgacacccccttgtggtnttccaccgattcccggttctnt

SEQ ID NO: 324 - DNA, 87 bp, Artificial Sequence
  Synthetic Probe
  modified_base (2)..(2): DNP phosphoramidite base
  misc_feature (2)..(2): n is a, c, g, or t
  modified_base (23)..(23): DNP phosphoramidite base
  misc_feature (23)..(23): n is a, c, g, or t
  modified_base (44)..(44): DNP phosphoramidite base
  misc_feature (44)..(44): n is a, c, g, or t
  modified_base (65)..(65): DNP phosphoramidite base
  misc_feature (65)..(65): n is a, c, g, or t
  modified_base (86)..(86): DNP phosphoramidite base
  misc_feature (86)..(86): n is a, c, g, or t
tnaaatgtctctacatttcttcngaactttaattcgggccatanctagcattcgtgagcatttantttgagctgagtacgcacatnt

SEQ ID NO: 325 - DNA, 87 bp, Artificial Sequence
  Synthetic Probe
  modified_base (2)..(2): DNP phosphoramidite base
  misc_feature (2)..(2): n is a, c, g, or t
  modified_base (23)..(23): DNP phosphoramidite base
  misc_feature (23)..(23): n is a, c, g, or t
  modified_base (44)..(44): DNP phosphoramidite base
  misc_feature (44)..(44): n is a, c, g, or t
  modified_base (65)..(65): DNP phosphoramidite base
  misc_feature (65)..(65): n is a, c, g, or t
  modified_base (86)..(86): DNP phosphoramidite base
  misc_feature (86)..(86): n is a, c, g, or t
tngcgattgattggttgattggncatgtggttgtcagaaaaagncagtggacgtgaacaaagagnacatcattgcagccctaactnt

SEQ ID NO: 326 - DNA, 87 bp, Artificial Sequence
  Synthetic Probe
  modified_base (2)..(2): DNP phosphoramidite base
  misc_feature (2)..(2): n is a, c, g, or t
  modified_base (23)..(23): DNP phosphoramidite base
  misc_feature (23)..(23): n is a, c, g, or t
  modified_base (44)..(44): DNP phosphoramidite base
  misc_feature (44)..(44): n is a, c, g, or t
  modified_base (65)..(65): DNP phosphoramidite base
  misc_feature (65)..(65): n is a, c, g, or t
  modified_base (86)..(86): DNP phosphoramidite base
  misc_feature (86)..(86): n is a, c, g, or t
tncaggtttcaccctcttgcccntgagggcagcatcctagcccntaggtggttctctggtgtggncctcagtaaaaccgtgacgant

SEQ ID NO: 327 - DNA, 87 bp, Artificial Sequence
  Synthetic Probe
  modified_base (2)..(2): DNP phosphoramidite base
  misc_feature (2)..(2): n is a, c, g, or t
  modified_base (23)..(23): DNP phosphoramidite base
  misc_feature (23)..(23): n is a, c, g, or t
  modified_base (44)..(44): DNP phosphoramidite base
  misc_feature (44)..(44): n is a, c, g, or t
  modified_base (65)..(65): DNP phosphoramidite base
  misc_feature (65)..(65): n is a, c, g, or t
  modified_base (86)..(86): DNP phosphoramidite base
  misc_feature (86)..(86): n is a, c, g, or t
tnctctctgtccccaacaggcgngctggcacacttcggggtctngagatgccatctgccttgccntaacctgggcaagaccactcnt

SEQ ID NO: 328 - DNA, 87 bp, Artificial Sequence
  Synthetic Probe
  modified_base (2)..(2): DNP phosphoramidite base
  misc_feature (2)..(2): n is a, c, g, or t
  modified_base (23)..(23): DNP phosphoramidite base
  misc_feature (23)..(23): n is a, c, g, or t
  modified_base (44)..(44): DNP phosphoramidite base
  misc_feature (44)..(44): n is a, c, g, or t
  modified_base (65)..(65): DNP phosphoramidite base
  misc_feature (65)..(65): n is a, c, g, or t
  modified_base (86)..(86): DNP phosphoramidite base
  misc_feature (86)..(86): n is a, c, g, or t
tnggcgcccaaagcctccagccntgagagtcgcctcactcgtgntgacggtgcttagaaaccccncttttttggttttgtctttant

SEQ ID NO: 329 - DNA, 87 bp, Artificial Sequence
  Synthetic Probe
  modified_base (2)..(2): DNP phosphoramidite base
  misc_feature (2)..(2): n is a, c, g, or t
  modified_base (23)..(23): DNP phosphoramidite base
  misc_feature (23)..(23): n is a, c, g, or t
  modified_base (44)..(44): DNP phosphoramidite base
  misc_feature (44)..(44): n is a, c, g, or t
  modified_base (65)..(65): DNP phosphoramidite base
  misc_feature (65)..(65): n is a, c, g, or t
  modified_base (86)..(86): DNP phosphoramidite base
  misc_feature (86)..(86): n is a, c, g, or t
tnatttagtgaccgtgtgatatntgcagtaaagactgcctccancgttggacatgtagtggattnctagttcaggctctcctgcant

SEQ ID NO: 330 - DNA, 87 bp, Artificial Sequence
  Synthetic Probe
  modified_base (2)..(2): DNP phosphoramidite base
  misc_feature (2)..(2): n is a, c, g, or t
  modified_base (23)..(23): DNP phosphoramidite base
  misc_feature (23)..(23): n is a, c, g, or t
  modified_base (44)..(44): DNP phosphoramidite base
  misc_feature (44)..(44): n is a, c, g, or t
  modified_base (65)..(65): DNP phosphoramidite base
  misc_feature (65)..(65): n is a, c, g, or t
  modified_base (86)..(86): DNP phosphoramidite base
  misc_feature (86)..(86): n is a, c, g, or t
tnacatttggttatcgttcggcncctaagtaggagtcagacccnttcctgatccgtgtgcctccntcctctcacctaacagcctgnt

SEQ ID NO: 331 - DNA, 87 bp, Artificial Sequence
  Synthetic Probe
  modified_base (2)..(2): DNP phosphoramidite base
  misc_feature (2)..(2): n is a, c, g, or t
  modified_base (23)..(23): DNP phosphoramidite base
  misc_feature (23)..(23): n is a, c, g, or t
  modified_base (44)..(44): DNP phosphoramidite base
  misc_feature (44)..(44): n is a, c, g, or t
  modified_base (65)..(65): DNP phosphoramidite base
  misc_feature (65)..(65): n is a, c, g, or t
  modified_base (86)..(86): DNP phosphoramidite base
  misc_feature (86)..(86): n is a, c, g, or t
tnatcacttcagtgctgatatancccagaacttagtgaagcagncaaaaatagtatgtgcacctncagctagaacacctgtcatgnt

SEQ ID NO: 332 - DNA, 87 bp, Artificial Sequence
  Synthetic Probe
  modified_base (2)..(2): DNP phosphoramidite base
  misc_feature (2)..(2): n is a, c, g, or t
  modified_base (23)..(23): DNP phosphoramidite base
  misc_feature (23)..(23): n is a, c, g, or t
  modified_base (44)..(44): DNP phosphoramidite base
  misc_feature (44)..(44): n is a, c, g, or t
  modified_base (65)..(65): DNP phosphoramidite base
  misc_feature (65)..(65): n is a, c, g, or t
  modified_base (86)..(86): DNP phosphoramidite base
  misc_feature (86)..(86): n is a, c, g, or t
tntgtgtaattttagatcctttncattgaggttggctctgctgntgttggcagtataagaaaagngggtctttgtggccatctctnt

SEQ ID NO: 333 - DNA, 87 bp, Artificial Sequence
  Synthetic Probe
  modified_base (2)..(2): DNP phosphoramidite base
  misc_feature (2)..(2): n is a, c, g, or t
  modified_base (23)..(23): DNP phosphoramidite base
  misc_feature (23)..(23): n is a, c, g, or t
  modified_base (44)..(44): DNP phosphoramidite base
  misc_feature (44)..(44): n is a, c, g, or t
  modified_base (65)..(65): DNP phosphoramidite base
  misc_feature (65)..(65): n is a, c, g, or t
  modified_base (86)..(86): DNP phosphoramidite base
  misc_feature (86)..(86): n is a, c, g, or t
tntacctattagtctacccagcnctacacattcttcatatctgnaagaaattaaccctagtatanctgcttactggcccttcctant

SEQ ID NO: 334 - DNA, 87 bp, Artificial Sequence
  Synthetic Probe
  modified_base (2)..(2): DNP phosphoramidite base
  misc_feature (2)..(2): n is a, c, g, or t
  modified_base (23)..(23): DNP phosphoramidite base
  misc_feature (23)..(23): n is a, c, g, or t
  modified_base (44)..(44): DNP phosphoramidite base
  misc_feature (44)..(44): n is a, c, g, or t
  modified_base (65)..(65): DNP phosphoramidite base
  misc_feature (65)..(65): n is a, c, g, or t
  modified_base (86)..(86): DNP phosphoramidite base
  misc_feature (86)..(86): n is a, c, g, or t
tnccctaagtggtccttaccatnttcccctatgtaacaaccttntctctgcatgacatggcacanccttcctggtgtttatttcant

SEQ ID NO: 335 - DNA, 87 bp, Artificial Sequence
  Synthetic Probe
  modified_base (2)..(2): DNP phosphoramidite base
  misc_feature (2)..(2): n is a, c, g, or t
  modified_base (23)..(23): DNP phosphoramidite base
  misc_feature (23)..(23): n is a, c, g, or t
  modified_base (44)..(44): DNP phosphoramidite base
  misc_feature (44)..(44): n is a, c, g, or t
  modified_base (65)..(65): DNP phosphoramidite base
  misc_feature (65)..(65): n is a, c, g, or t
  modified_base (86)..(86): DNP phosphoramidite base
  misc_feature (86)..(86): n is a, c, g, or t
tntatgttgaaaggttaagaatnagtgttagacacagttctacntcagctataccacatagtgtnggaagaaaagaacagagggtnt

SEQ ID NO: 336 - DNA, 87 bp, Artificial Sequence
  Synthetic Probe
  modified_base (2)..(2): DNP phosphoramidite base
  misc_feature (2)..(2): n is a, c, g, or t
  modified_base (23)..(23): DNP phosphoramidite base
  misc_feature (23)..(23): n is a, c, g, or t
  modified_base (44)..(44): DNP phosphoramidite base
  misc_feature (44)..(44): n is a, c, g, or t
  modified_base (65)..(65): DNP phosphoramidite base
  misc_feature (65)..(65): n is a, c, g, or t
  modified_base (86)..(86): DNP phosphoramidite base
  misc_feature (86)..(86): n is a, c, g, or t
tnaaaatctgctgatattgtaantttgtgatgaagagtgtgacntcacctgaatcagtcaaccangcaaacccaagaggagagtcnt

SEQ ID NO: 337 - DNA, 87 bp, Artificial Sequence
  Synthetic Probe
  modified_base (2)..(2): DNP phosphoramidite base
  misc_feature (2)..(2): n is a, c, g, or t
  modified_base (23)..(23): DNP phosphoramidite base
  misc_feature (23)..(23): n is a, c, g, or t
  modified_base (44)..(44): DNP phosphoramidite base
  misc_feature (44)..(44): n is a, c, g, or t
  modified_base (65)..(65): DNP phosphoramidite base
  misc_feature (65)..(65): n is a, c, g, or t
  modified_base (86)..(86): DNP phosphoramidite base
  misc_feature (86)..(86): n is a, c, g, or t
tnttgacaagagccaagctttgnaatgtgactgcccagcagaanatggcctttactgagagctanatagcagtggcctctataaant

SEQ ID NO: 338 - DNA, 87 bp, Artificial Sequence
  Synthetic Probe
  modified_base (2)..(2): DNP phosphoramidite base
  misc_feature (2)..(2): n is a, c, g, or t
  modified_base (23)..(23): DNP phosphoramidite base
  misc_feature (23)..(23): n is a, c, g, or t
  modified_base (44)..(44): DNP phosphoramidite base
  misc_feature (44)..(44): n is a, c, g, or t
  modified_base (65)..(65): DNP phosphoramidite base
  misc_feature (65)..(65): n is a, c, g, or t
  modified_base (86)..(86): DNP phosphoramidite base
  misc_feature (86)..(86): n is a, c, g, or t
tncgagtatgcaaggaaagtttnctctaccaatatgcttctgantagaacatgccaaactgcatngaagaggatccctacatttgnt

SEQ ID NO: 339 - DNA, 87 bp, Artificial Sequence
  Synthetic Probe
  modified_base (2)..(2): DNP phosphoramidite base
  misc_feature (2)..(2): n is a, c, g, or t
  modified_base (23)..(23): DNP phosphoramidite base
  misc_feature (23)..(23): n is a, c, g, or t
  modified_base (44)..(44): DNP phosphoramidite base
  misc_feature (44)..(44): n is a, c, g, or t
  modified_base (65)..(65): DNP phosphoramidite base
  misc_feature (65)..(65): n is a, c, g, or t
  modified_base (86)..(86): DNP phosphoramidite base
  misc_feature (86)..(86): n is a, c, g, or t
tntgagaacctcagccagcacanttgcagacacccattttagtngatcacctctattggtgtganacagtgtgatgtacagttctnt

SEQ ID NO: 340 - DNA, 87 bp, Artificial Sequence
  Synthetic Probe
  modified_base (2)..(2): DNP phosphoramidite base
  misc_feature (2)..(2): n is a, c, g, or t
  modified_base (23)..(23): DNP phosphoramidite base
  misc_feature (23)..(23): n is a, c, g, or t
  modified_base (44)..(44): DNP phosphoramidite base
  misc_feature (44)..(44): n is a, c, g, or t
  modified_base (65)..(65): DNP phosphoramidite base
  misc_feature (65)..(65): n is a, c, g, or t
  modified_base (86)..(86): DNP phosphoramidite base
  misc_feature (86)..(86): n is a, c, g, or t
tnctacatttccaggagcacagnctgtgatgaacagtacttgtngtcagttctgtgaacatgaanactaatgatccagaagacttnt

SEQ ID NO: 341 - DNA, 87 bp, Artificial Sequence
  Synthetic Probe
  modified_base (2)..(2): DNP phosphoramidite base
  misc_feature (2)..(2): n is a, c, g, or t
  modified_base (23)..(23): DNP phosphoramidite base
  misc_feature (23)..(23): n is a, c, g, or t
  modified_base (44)..(44): DNP phosphoramidite base
  misc_feature (44)..(44): n is a, c, g, or t
  modified_base (65)..(65): DNP phosphoramidite base
  misc_feature (65)..(65): n is a, c, g, or t
  modified_base (86)..(86): DNP phosphoramidite base
  misc_feature (86)..(86): n is a, c, g, or t
tnttttggactttttgatgaatnctgcagcttcaggacctatcnccaatgacagtttgtcccacnaaaaccttttcgccttggccnt

SEQ ID NO: 342 - DNA, 87 bp, Artificial Sequence
  Synthetic Probe
  modified_base (2)..(2): DNP phosphoramidite base
  misc_feature (2)..(2): n is a, c, g, or t
  modified_base (23)..(23): DNP phosphoramidite base
  misc_feature (23)..(23): n is a, c, g, or t
  modified_base (44)..(44): DNP phosphoramidite base
  misc_feature (44)..(44): n is a, c, g, or t
  modified_base (65)..(65): DNP phosphoramidite base
  misc_feature (65)..(65): n is a, c, g, or t
  modified_base (86)..(86): DNP phosphoramidite base
  misc_feature (86)..(86): n is a, c, g, or t
tnaattttggttggctaaaattntgagaatacagaattcccacngtttcctgcctaccctgttcnattcttggttatgtccagagnt

SEQ ID NO: 343 - DNA, 87 bp, Artificial Sequence
  Synthetic Probe
  modified_base (2)..(2): DNP phosphoramidite base
  misc_feature (2)..(2): n is a, c, g, or t
  modified_base (23)..(23): DNP phosphoramidite base
  misc_feature (23)..(23): n is a, c, g, or t
  modified_base (44)..(44): DNP phosphoramidite base
  misc_feature (44)..(44): n is a, c, g, or t
  modified_base (65)..(65): DNP phosphoramidite base
  misc_feature (65)..(65): n is a, c, g, or t
  modified_base (86)..(86): DNP phosphoramidite base
  misc_feature (86)..(86): n is a, c, g, or t
tnaagaagttggaagggggaacnggaaaaccactctcctggtangcagtctctgcccacaacaanaccttgccttctgcccttaant

SEQ ID NO: 344 - DNA, 87 bp, Artificial Sequence
  Synthetic Probe
  modified_base (2)..(2): DNP phosphoramidite base
  misc_feature (2)..(2): n is a, c, g, or t
  modified_base (23)..(23): DNP phosphoramidite base
  misc_feature (23)..(23): n is a, c, g, or t
  modified_base (44)..(44): DNP phosphoramidite base
  misc_feature (44)..(44): n is a, c, g, or t
  modified_base (65)..(65): DNP phosphoramidite base
  misc_feature (65)..(65): n is a, c, g, or t
  modified_base (86)..(86): DNP phosphoramidite base
  misc_feature (86)..(86): n is a, c, g, or t
tnctcgggaagatgaggcagttntggcatctgtggccgagttgnctgttgccgggtgatagttgngagcggagactgtgagtgccnt

SEQ ID NO: 345 - DNA, 87 bp, Artificial Sequence
  Synthetic Probe
  modified_base (2)..(2): DNP phosphoramidite base
  misc_feature (2)..(2): n is a, c, g, or t
  modified_base (23)..(23): DNP phosphoramidite base
  misc_feature (23)..(23): n is a, c, g, or t
  modified_base (44)..(44): DNP phosphoramidite base
  misc_feature (44)..(44): n is a, c, g, or t
  modified_base (65)..(65): DNP phosphoramidite base
  misc_feature (65)..(65): n is a, c, g, or t
  modified_base (86)..(86): DNP phosphoramidite base
  misc_feature (86)..(86): n is a, c, g, or t
tnctatgctttcttaaacttatnagtccttgaagtttctggtanctttggctggaagcgttaatngccctcttgaagccttacctnt

SEQ ID NO: 346 - DNA, 87 bp, Artificial Sequence
  Synthetic Probe
  modified_base (2)..(2): DNP phosphoramidite base
  misc_feature (2)..(2): n is a, c, g, or t
  modified_base (23)..(23): DNP phosphoramidite base
  misc_feature (23)..(23): n is a, c, g, or t
  modified_base (44)..(44): DNP phosphoramidite base
  misc_feature (44)..(44): n is a, c, g, or t
  modified_base (65)..(65): DNP phosphoramidite base
  misc_feature (65)..(65): n is a, c, g, or t
  modified_base (86)..(86): DNP phosphoramidite base
  misc_feature (86)..(86): n is a, c, g, or t
tnttggcttcgcctcactaaccnctgttccctgatgtactttangagtcacatgcagtgacaaancttagtcacaattagtttcgnt

SEQ ID NO: 347 - DNA, 87 bp, Artificial Sequence
  Synthetic Probe
  modified_base (2)..(2): DNP phosphoramidite base
  misc_feature (2)..(2): n is a, c, g, or t
  modified_base (23)..(23): DNP phosphoramidite base
  misc_feature (23)..(23): n is a, c, g, or t
  modified_base (44)..(44): DNP phosphoramidite base
  misc_feature (44)..(44): n is a, c, g, or t
  modified_base (65)..(65): DNP phosphoramidite base
  misc_feature (65)..(65): n is a, c, g, or t
  modified_base (86)..(86): DNP phosphoramidite base
  misc_feature (86)..(86): n is a, c, g, or t
tnttgcatgtctatcatccactnttagttggtgcttttctaacntttatctccctctagtagcantaatggcagaacctgtttctnt

SEQ ID NO: 348 - DNA, 87 bp, Artificial Sequence
  Synthetic Probe
  modified_base (2)..(2): DNP phosphoramidite base
  misc_feature (2)..(2): n is a, c, g, or t
  modified_base (23)..(23): DNP phosphoramidite base
  misc_feature (23)..(23): n is a, c, g, or t
  modified_base (44)..(44): DNP phosphoramidite base
  misc_feature (44)..(44): n is a, c, g, or t
  modified_base (65)..(65): DNP phosphoramidite base
  misc_feature (65)..(65): n is a, c, g, or t
  modified_base (86)..(86): DNP phosphoramidite base
  misc_feature (86)..(86): n is a, c, g, or t
tncagacatatctcattctctcnaaatgaggctgaattgcagtnggaaagggggaaaaaggagtnttcataactgttaaaggtgant

SEQ ID NO: 349 - DNA, 87 bp, Artificial Sequence
  Synthetic Probe
  modified_base (2)..(2): DNP phosphoramidite base
  misc_feature (2)..(2): n is a, c, g, or t
  modified_base (23)..(23): DNP phosphoramidite base
  misc_feature (23)..(23): n is a, c, g, or t
  modified_base (44)..(44): DNP phosphoramidite base
  misc_feature (44)..(44): n is a, c, g, or t
  modified_base (65)..(65): DNP phosphoramidite base
  misc_feature (65)..(65): n is a, c, g, or t
  modified_base (86)..(86): DNP phosphoramidite base
  misc_feature (86)..(86): n is a, c, g, or t
tnatagaacgtggtaaagtagcnaaggtctttcctagcttggangaccttgcactgtatcttaantttctgaggggctcctattcnt

SEQ ID NO: 350 - DNA, 87 bp, Artificial Sequence
  Synthetic Probe
  modified_base (2)..(2): DNP phosphoramidite base
  misc_feature (2)..(2): n is a, c, g, or t
  modified_base (23)..(23): DNP phosphoramidite base
  misc_feature (23)..(23): n is a, c, g, or t
  modified_base (44)..(44): DNP phosphoramidite base
  misc_feature (44)..(44): n is a, c, g, or t
  modified_base (65)..(65): DNP phosphoramidite base
  misc_feature (65)..(65): n is a, c, g, or t
  modified_base (86)..(86): DNP phosphoramidite base
  misc_feature (86)..(86): n is a, c, g, or t
tnacttttaatattcttgaaatntcttttgggcgggattcttgntgacccattgccacggagtantgcaccttttaccaaacattnt

SEQ ID NO: 351 - DNA, 87 bp, Artificial Sequence
  Synthetic Probe
  modified_base (2)..(2): DNP phosphoramidite base
  misc_feature (2)..(2): n is a, c, g, or t
  modified_base (23)..(23): DNP phosphoramidite base
  misc_feature (23)..(23): n is a, c, g, or t
  modified_base (44)..(44): DNP phosphoramidite base
  misc_feature (44)..(44): n is a, c, g, or t
  modified_base (65)..(65): DNP phosphoramidite base
  misc_feature (65)..(65): n is a, c, g, or t
  modified_base (86)..(86): DNP phosphoramidite base
  misc_feature (86)..(86): n is a, c, g, or t
tncaacatataagaatccggaancttgatcgaatagccactganagatgatctggtagaaatgcnaaggatataaagacaagcttnt

SEQ ID NO: 352 - DNA, 87 bp, Artificial Sequence
  Synthetic Probe
  modified_base (2)..(2): DNP phosphoramidite base
  misc_feature (2)..(2): n is a, c, g, or t
  modified_base (23)..(23): DNP phosphoramidite base
  misc_feature (23)..(23): n is a, c, g, or t
  modified_base (44)..(44): DNP phosphoramidite base
  misc_feature (44)..(44): n is a, c, g, or t
  modified_base (65)..(65): DNP phosphoramidite base
  misc_feature (65)..(65): n is a, c, g, or t
  modified_base (86)..(86): DNP phosphoramidite base
  misc_feature (86)..(86): n is a, c, g, or t
tngtgtctttcttaagtttgacnaattatctggattatggcggnggagaaaaaggcagtgatcanggtacgtcttccaaaattttnt

SEQ ID NO: 353 - DNA, 87 bp, Artificial Sequence
  Synthetic Probe
  modified_base (2)..(2): DNP phosphoramidite base
  misc_feature (2)..(2): n is a, c, g, or t
  modified_base (23)..(23): DNP phosphoramidite base
  misc_feature (23)..(23): n is a, c, g, or t
  modified_base (44)..(44): DNP phosphoramidite base
  misc_feature (44)..(44): n is a, c, g, or t
  modified_base (65)..(65): DNP phosphoramidite base
  misc_feature (65)..(65): n is a, c, g, or t
  modified_base (86)..(86): DNP phosphoramidite base
  misc_feature (86)..(86): n is a, c, g, or t
tnaggcgtacattggtgtaacangtccagagtgatagggtgatnctctgccacagcttatatgcnaaagacaaatgactagctccnt

SEQ ID NO: 354 - DNA, 87 bp, Artificial Sequence
  Synthetic Probe
  modified_base (2)..(2): DNP phosphoramidite base
  misc_feature (2)..(2): n is a, c, g, or t
  modified_base (23)..(23): DNP phosphoramidite base
  misc_feature (23)..(23): n is a, c, g, or t
  modified_base (44)..(44): DNP phosphoramidite base
  misc_feature (44)..(44): n is a, c, g, or t
  modified_base (65)..(65): DNP phosphoramidite base
  misc_feature (65)..(65): n is a, c, g, or t
  modified_base (86)..(86): DNP phosphoramidite base
  misc_feature (86)..(86): n is a, c, g, or t
tnaagataaatcttaagagagantcctaggcatccttgcaggantgtggtatattggcaataganagccaatgttgagctaatgant

SEQ ID NO: 355 - DNA, 87 bp, Artificial Sequence
  Synthetic Probe
  modified_base (2)..(2): DNP phosphoramidite base
  misc_feature (2)..(2): n is a, c, g, or t
  modified_base (23)..(23): DNP phosphoramidite base
  misc_feature (23)..(23): n is a, c, g, or t
  modified_base (44)..(44): DNP phosphoramidite base
  misc_feature (44)..(44): n is a, c, g, or t
  modified_base (65)..(65): DNP phosphoramidite base
  misc_feature (65)..(65): n is a, c, g, or t
  modified_base (86)..(86): DNP phosphoramidite base
  misc_feature (86)..(86): n is a, c, g, or t
tnggatgcttttgcagtgaaccnaaaaggctcccagtgatatcntgggacttgggttgacttaantggaaagcaagtccctgaagnt

SEQ ID NO: 356 - DNA, 87 bp, Artificial Sequence
  Synthetic Probe
  modified_base (2)..(2): DNP phosphoramidite base
  misc_feature (2)..(2): n is a, c, g, or t
  modified_base (23)..(23): DNP phosphoramidite base
  misc_feature (23)..(23): n is a, c, g, or t
  modified_base (44)..(44): DNP phosphoramidite base
  misc_feature (44)..(44): n is a, c, g, or t
  modified_base (65)..(65): DNP phosphoramidite base
  misc_feature (65)..(65): n is a, c, g, or t
  modified_base (86)..(86): DNP phosphoramidite base
  misc_feature (86)..(86): n is a, c, g, or t
tnaaagcagttagttaaggcacntgtttctcattgtggttactnttctcttgagtctaaagatcntcttccacaaacacaaaagtnt

SEQ ID NO: 357 - DNA, 87 bp, Artificial Sequence
  Synthetic Probe
  modified_base (2)..(2): DNP phosphoramidite base
  misc_feature (2)..(2): n is a, c, g, or t
  modified_base (23)..(23): DNP phosphoramidite base
  misc_feature (23)..(23): n is a, c, g, or t
  modified_base (44)..(44): DNP phosphoramidite base
  misc_feature (44)..(44): n is a, c, g, or t
  modified_base (65)..(65): DNP phosphoramidite base
  misc_feature (65)..(65): n is a, c, g, or t
  modified_base (86)..(86): DNP phosphoramidite base
  misc_feature (86)..(86): n is a, c, g, or t
tntgttttcatagaaccagaagnggctgtttctagtctttctantagtgtgtagttccctggatnttctctagcagtatagggctnt

SEQ ID NO: 358 - DNA, 87 bp, Artificial Sequence
  Synthetic Probe
  modified_base (2)..(2): DNP phosphoramidite base
  misc_feature (2)..(2): n is a, c, g, or t
  modified_base (23)..(23): DNP phosphoramidite base
  misc_feature (23)..(23): n is a, c, g, or t
  modified_base (44)..(44): DNP phosphoramidite base
  misc_feature (44)..(44): n is a, c, g, or t
  modified_base (65)..(65): DNP phosphoramidite base
  misc_feature (65)..(65): n is a, c, g, or t
  modified_base (86)..(86): DNP phosphoramidite base
  misc_feature (86)..(86): n is a, c, g, or t
tnagaatatactccaggtttcangcttaactgtgtacactttanagctgctgtcagacttagaangattatttagccagatgtctnt

SEQ ID NO: 359 - DNA, 87 bp, Artificial Sequence
  Synthetic Probe
  modified_base (2)..(2): DNP phosphoramidite base
  misc_feature (2)..(2): n is a, c, g, or t
  modified_base (23)..(23): DNP phosphoramidite base
  misc_feature (23)..(23): n is a, c, g, or t
  modified_base (44)..(44): DNP phosphoramidite base
  misc_feature (44)..(44): n is a, c, g, or t
  modified_base (65)..(65): DNP phosphoramidite base
  misc_feature (65)..(65): n is a, c, g, or t
  modified_base (86)..(86): DNP phosphoramidite base
  misc_feature (86)..(86): n is a, c, g, or t
tngtactaaatcctaacttctanacccttaatcttcacttcagntgcccaagtggtaatcttganacccaacattgcaattctaant

SEQ ID NO: 360 - DNA, 87 bp, Artificial Sequence
  Synthetic Probe
  modified_base (2)..(2): DNP phosphoramidite base
  misc_feature (2)..(2): n is a, c, g, or t
  modified_base (23)..(23): DNP phosphoramidite base
  misc_feature (23)..(23): n is a, c, g, or t
  modified_base (44)..(44): DNP phosphoramidite base
  misc_feature (44)..(44): n is a, c, g, or t
  modified_base (65)..(65): DNP phosphoramidite base
  misc_feature (65)..(65): n is a, c, g, or t
  modified_base (86)..(86): DNP phosphoramidite base
  misc_feature (86)..(86): n is a, c, g, or t
tncagctatctcgataagatctnaattgttcagaggctactggnattatcagtagatgtcctctncaagccaagctataggatacnt

SEQ ID NO: 361 - DNA, 87 bp, Artificial Sequence
  Synthetic Probe
  modified_base (2)..(2): DNP phosphoramidite base
  misc_feature (2)..(2): n is a, c, g, or t
  modified_base (23)..(23): DNP phosphoramidite base
  misc_feature (23)..(23): n is a, c, g, or t
  modified_base (44)..(44): DNP phosphoramidite base
  misc_feature (44)..(44): n is a, c, g, or t
  modified_base (65)..(65): DNP phosphoramidite base
  misc_feature (65)..(65): n is a, c, g, or t
  modified_base (86)..(86): DNP phosphoramidite base
  misc_feature (86)..(86): n is a, c, g, or t
tnacacatttatactgcttccantattggttcatggtatagctntgtgcttcccaagaatatctncgttgaggaggtgggaatgant

SEQ ID NO: 362 - DNA, 87 bp, Artificial Sequence
  Synthetic Probe
  modified_base (2)..(2): DNP phosphoramidite base
  misc_feature (2)..(2): n is a, c, g, or t
  modified_base (23)..(23): DNP phosphoramidite base
  misc_feature (23)..(23): n is a, c, g, or t
  modified_base (44)..(44): DNP phosphoramidite base
  misc_feature (44)..(44): n is a, c, g, or t
  modified_base (65)..(65): DNP phosphoramidite base
  misc_feature (65)..(65): n is a, c, g, or t
  modified_base (86)..(86): DNP phosphoramidite base
  misc_feature (86)..(86): n is a, c, g, or t
tnagagacatgaaggctaagcantaggtcgtaaataggacattngaatgcacgtgtagcatcctngatgatttcaggataagaaant

SEQ ID NO: 363 - DNA, 87 bp, Artificial Sequence
  Synthetic Probe
  modified_base (2)..(2): DNP phosphoramidite base
  misc_feature (2)..(2): n is a, c, g, or t
  modified_base (23)..(23): DNP phosphoramidite base
  misc_feature (23)..(23): n is a, c, g, or t
  modified_base (44)..(44): DNP phosphoramidite base
  misc_feature (44)..(44): n is a, c, g, or t
  modified_base (65)..(65): DNP phosphoramidite base
  misc_feature (65)..(65): n is a, c, g, or t
  modified_base (86)..(86): DNP phosphoramidite base
  misc_feature (86)..(86): n is a, c, g, or t
tntactagttgtgtttgtttatntgcctggtgaacaaacaaggncgatgctacctgccaaccagnaaagttgatttggtaagcagnt

SEQ ID NO: 364 - DNA, 87 bp, Artificial Sequence
  Synthetic Probe
  modified_base (2)..(2): DNP phosphoramidite base
  misc_feature (2)..(2): n is a, c, g, or t
  modified_base (23)..(23): DNP phosphoramidite base
  misc_feature (23)..(23): n is a, c, g, or t
  modified_base (44)..(44): DNP phosphoramidite base
  misc_feature (44)..(44): n is a, c, g, or t
  modified_base (65)..(65): DNP phosphoramidite base
  misc_feature (65)..(65): n is a, c, g, or t
  modified_base (86)..(86): DNP phosphoramidite base
  misc_feature (86)..(86): n is a, c, g, or t
tncctccgtgtggcctctgtttnaattagatcgtgctgctatangcagttccttctagctcagtntgctttgatgtagtacccaant

SEQ ID NO: 365 - DNA, 87 bp, Artificial Sequence
  Synthetic Probe
  modified_base (2)..(2): DNP phosphoramidite base
  misc_feature (2)..(2): n is a, c, g, or t
  modified_base (23)..(23): DNP phosphoramidite base
  misc_feature (23)..(23): n is a, c, g, or t
  modified_base (44)..(44): DNP phosphoramidite base
  misc_feature (44)..(44): n is a, c, g, or t
  modified_base (65)..(65): DNP phosphoramidite base
  misc_feature (65)..(65): n is a, c, g, or t
  modified_base (86)..(86): DNP phosphoramidite base
  misc_feature (86)..(86): n is a, c, g, or t
tntttttccttgagtcatgctanatagatggttcaatacatganatgagtcccttgctgaaatgnctttaggacttcagactaccnt

SEQ ID NO: 366 - DNA, 87 bp, Artificial Sequence
  Synthetic Probe
  modified_base (2)..(2): DNP phosphoramidite base
  misc_feature (2)..(2): n is a, c, g, or t
  modified_base (23)..(23): DNP phosphoramidite base
  misc_feature (23)..(23): n is a, c, g, or t
  modified_base (44)..(44): DNP phosphoramidite base
  misc_feature (44)..(44): n is a, c, g, or t
  modified_base (65)..(65): DNP phosphoramidite base
  misc_feature (65)..(65): n is a, c, g, or t
  modified_base (86)..(86): DNP phosphoramidite base
  misc_feature (86)..(86): n is a, c, g, or t
tnctggcagcttataaagctctnccctcatttgtgtgctgatcnccttttaagcctgattgattntctggtaacttcaggttttcnt

SEQ ID NO: 367 - DNA, 87 bp, Artificial Sequence
  Synthetic Probe
  modified_base (2)..(2): DNP phosphoramidite base
  misc_feature (2)..(2): n is a, c, g, or t
  modified_base (23)..(23): DNP phosphoramidite base
  misc_feature (23)..(23): n is a, c, g, or t
  modified_base (44)..(44): DNP phosphoramidite base
  misc_feature (44)..(44): n is a, c, g, or t
  modified_base (65)..(65): DNP phosphoramidite base
  misc_feature (65)..(65): n is a, c, g, or t
  modified_base (86)..(86): DNP phosphoramidite base
  misc_feature (86)..(86): n is a, c, g, or t
tngatctttgtggtttcttaatnaaagaaaactgaatgaatagnaggtagcctggccaagcagtnctaagaaagctgaatgaattnt

SEQ ID NO: 368 - DNA, 87 bp, Artificial Sequence
  Synthetic Probe
  modified_base (2)..(2): DNP phosphoramidite base
  misc_feature (2)..(2): n is a, c, g, or t
  modified_base (23)..(23): DNP phosphoramidite base
  misc_feature (23)..(23): n is a, c, g, or t
  modified_base (44)..(44): DNP phosphoramidite base
  misc_feature (44)..(44): n is a, c, g, or t
  modified_base (65)..(65): DNP phosphoramidite base
  misc_feature (65)..(65): n is a, c, g, or t
  modified_base (86)..(86): DNP phosphoramidite base
  misc_feature (86)..(86): n is a, c, g, or t
tngtagacttcatagcaggatgntggccttgtctgtatgtgtangattggggtttggataattanggaattccgagagtgatgtcnt

SEQ ID NO: 369 - DNA, 87 bp, Artificial Sequence
  Synthetic Probe
  modified_base (2)..(2): DNP phosphoramidite base
  misc_feature (2)..(2): n is a, c, g, or t
  modified_base (23)..(23): DNP phosphoramidite base
  misc_feature (23)..(23): n is a, c, g, or t
  modified_base (44)..(44): DNP phosphoramidite base
  misc_feature (44)..(44): n is a, c, g, or t
  modified_base (65)..(65): DNP phosphoramidite base
  misc_feature (65)..(65): n is a, c, g, or t
  modified_base (86)..(86): DNP phosphoramidite base
  misc_feature (86)..(86): n is a, c, g, or t
tnggaattttttttctgttcttngataatttcttactttgcgcnagggccccaagcatgagtaanagtttattgtgcttctgaagnt

SEQ ID NO: 370 - DNA, 87 bp, Artificial Sequence
  Synthetic Probe
  modified_base (2)..(2): DNP phosphoramidite base
  misc_feature (2)..(2): n is a, c, g, or t
  modified_base (23)..(23): DNP phosphoramidite base
  misc_feature (23)..(23): n is a, c, g, or t
  modified_base (44)..(44): DNP phosphoramidite base
  misc_feature (44)..(44): n is a, c, g, or t
  modified_base (65)..(65): DNP phosphoramidite base
  misc_feature (65)..(65): n is a, c, g, or t
  modified_base (86)..(86): DNP phosphoramidite base
  misc_feature (86)..(86): n is a, c, g, or t
tntttatgtagcttattcatgtntcacagccatatagcagaggntaatatcgtctcttgagccanggataaaatgcagcccactant

SEQ ID NO: 371 - DNA, 87 bp, Artificial Sequence
  Synthetic Probe
  modified_base (2)..(2): DNP phosphoramidite base
  misc_feature (2)..(2): n is a, c, g, or t
  modified_base (23)..(23): DNP phosphoramidite base
  misc_feature (23)..(23): n is a, c, g, or t
  modified_base (44)..(44): DNP phosphoramidite base
  misc_feature (44)..(44): n is a, c, g, or t
  modified_base (65)..(65): DNP phosphoramidite base
  misc_feature (65)..(65): n is a, c, g, or t
  modified_base (86)..(86): DNP phosphoramidite base
  misc_feature (86)..(86): n is a, c, g, or t
tntagattaggctcagccatttnggatagaatttaatgtgctanacgctgcaggagagctacctncaagaaatatatacagtagant

SEQ ID NO: 372 - DNA, 87 bp, Artificial Sequence
  Synthetic Probe
  modified_base (2)..(2): DNP phosphoramidite base
  misc_feature (2)..(2): n is a, c, g, or t
  modified_base (23)..(23): DNP phosphoramidite base
  misc_feature (23)..(23): n is a, c, g, or t
  modified_base (44)..(44): DNP phosphoramidite base
  misc_feature (44)..(44): n is a, c, g, or t
  modified_base (65)..(65): DNP phosphoramidite base
  misc_feature (65)..(65): n is a, c, g, or t
  modified_base (86)..(86): DNP phosphoramidite base
  misc_feature (86)..(86): n is a, c, g, or t
tngaattgtactaactgtacctnaaatagcaaagccctgtgtangattctggtaatgatctgtcntcagggtatgtgtatttttgnt

SEQ ID NO: 373 - DNA, 87 bp, Artificial Sequence
  Synthetic Probe
  modified_base (2)..(2): DNP phosphoramidite base
  misc_feature (2)..(2): n is a, c, g, or t
  modified_base (23)..(23): DNP phosphoramidite base
  misc_feature (23)..(23): n is a, c, g, or t
  modified_base (44)..(44): DNP phosphoramidite base
  misc_feature (44)..(44): n is a, c, g, or t
  modified_base (65)..(65): DNP phosphoramidite base
  misc_feature (65)..(65): n is a, c, g, or t
  modified_base (86)..(86): DNP phosphoramidite base
  misc_feature (86)..(86): n is a, c, g, or t
tnacttttttatttagtaaatcngcattgctggaaccaccaagngagtgtggaatgtccttgagntgtattatttatgcaagtcant

SEQ ID NO: 374 - DNA, 87 bp, Artificial Sequence
  Synthetic Probe
  modified_base (2)..(2): DNP phosphoramidite base
  misc_feature (2)..(2): n is a, c, g, or t
  modified_base (23)..(23): DNP phosphoramidite base
  misc_feature (23)..(23): n is a, c, g, or t
  modified_base (44)..(44): DNP phosphoramidite base
  misc_feature (44)..(44): n is a, c, g, or t
  modified_base (65)..(65): DNP phosphoramidite base
  misc_feature (65)..(65): n is a, c, g, or t
  modified_base (86)..(86): DNP phosphoramidite base
  misc_feature (86)..(86): n is a, c, g, or t
tnagcttttattgctcatttatnaacccaagaaatggtacaganccacagtaagtgggattaggntaacaactacaacatggaaant

SEQ ID NO: 375 - DNA, 87 bp, Artificial Sequence
  Synthetic Probe
  modified_base (2)..(2): DNP phosphoramidite base
  misc_feature (2)..(2): n is a, c, g, or t
  modified_base (23)..(23): DNP phosphoramidite base
  misc_feature (23)..(23): n is a, c, g, or t
  modified_base (44)..(44): DNP phosphoramidite base
  misc_feature (44)..(44): n is a, c, g, or t
  modified_base (65)..(65): DNP phosphoramidite base
  misc_feature (65)..(65): n is a, c, g, or t
  modified_base (86)..(86): DNP phosphoramidite base
  misc_feature (86)..(86): n is a, c, g, or t
tncttcactggacaatagaactnaatttagtgtcaaaggggagntttattcttgccctctgcttncaacctgtagtgctatgtgcnt

SEQ ID NO: 376 - DNA, 87 bp, Artificial Sequence
  Synthetic Probe
  modified_base (2)..(2): DNP phosphoramidite base
  misc_feature (2)..(2): n is a, c, g, or t
  modified_base (23)..(23): DNP phosphoramidite base
  misc_feature (23)..(23): n is a, c, g, or t
  modified_base (44)..(44): DNP phosphoramidite base
  misc_feature (44)..(44): n is a, c, g, or t
  modified_base (65)..(65): DNP phosphoramidite base
  misc_feature (65)..(65): n is a, c, g, or t
  modified_base (86)..(86): DNP phosphoramidite base
  misc_feature (86)..(86): n is a, c, g, or t
tnctaacacgtttacccttcccnataattagactactactgacnattcatgttcagttgaccacngagtgtgtacaaatcattctnt

SEQ ID NO: 377 - DNA, 87 bp, Artificial Sequence
  Synthetic Probe
  modified_base (2)..(2): DNP phosphoramidite base
  misc_feature (2)..(2): n is a, c, g, or t
  modified_base (23)..(23): DNP phosphoramidite base
  misc_feature (23)..(23): n is a, c, g, or t
  modified_base (44)..(44): DNP phosphoramidite base
  misc_feature (44)..(44): n is a, c, g, or t
  modified_base (65)..(65): DNP phosphoramidite base
  misc_feature (65)..(65): n is a, c, g, or t
  modified_base (86)..(86): DNP phosphoramidite base
  misc_feature (86)..(86): n is a, c, g, or t
tntgaagatttcagaaagaacantcgtcactattaaaatgatgnacaggcccaaatgggggattngtttaaccagttttcctaagnt

SEQ ID NO: 378 - DNA, 87 bp, Artificial Sequence
  Synthetic Probe
  modified_base (2)..(2): DNP phosphoramidite base
  misc_feature (2)..(2): n is a, c, g, or t
  modified_base (23)..(23): DNP phosphoramidite base
  misc_feature (23)..(23): n is a, c, g, or t
  modified_base (44)..(44): DNP phosphoramidite base
  misc_feature (44)..(44): n is a, c, g, or t
  modified_base (65)..(65): DNP phosphoramidite base
  misc_feature (65)..(65): n is a, c, g, or t
  modified_base (86)..(86): DNP phosphoramidite base
  misc_feature (86)..(86): n is a, c, g, or t
tnattctgtaacatattctaganagcacctacatccattatttnccaggagactagtttactacntatcatgcaatcgctgaggtnt

SEQ ID NO: 379 - DNA, 87 bp, Artificial Sequence
  Synthetic Probe
  modified_base (2)..(2): DNP phosphoramidite base
  misc_feature (2)..(2): n is a, c, g, or t
  modified_base (23)..(23): DNP phosphoramidite base
  misc_feature (23)..(23): n is a, c, g, or t
  modified_base (44)..(44): DNP phosphoramidite base
  misc_feature (44)..(44): n is a, c, g, or t
  modified_base (65)..(65): DNP phosphoramidite base
  misc_feature (65)..(65): n is a, c, g, or t
  modified_base (86)..(86): DNP phosphoramidite base
  misc_feature (86)..(86): n is a, c, g, or t
tngacggaattcaatgtggtgtngtgtaatcacaagtaaaaacnttgagctagggaggaaccttnggatattcagtctacatctcnt

SEQ ID NO: 380 - DNA, 87 bp, Artificial Sequence
  Synthetic Probe
  modified_base (2)..(2): DNP phosphoramidite base
  misc_feature (2)..(2): n is a, c, g, or t
  modified_base (23)..(23): DNP phosphoramidite base
  misc_feature (23)..(23): n is a, c, g, or t
  modified_base (44)..(44): DNP phosphoramidite base
  misc_feature (44)..(44): n is a, c, g, or t
  modified_base (65)..(65): DNP phosphoramidite base
  misc_feature (65)..(65): n is a, c, g, or t
  modified_base (86)..(86): DNP phosphoramidite base
  misc_feature (86)..(86): n is a, c, g, or t
tntatatttagcaactggagccncctattattagaaagcaaagngtgtaaccatgaagtaattgntggtagtgaggctactctgtnt

SEQ ID NO: 381 - DNA, 87 bp, Artificial Sequence
  Synthetic Probe
  modified_base (2)..(2): DNP phosphoramidite base
  misc_feature (2)..(2): n is a, c, g, or t
  modified_base (23)..(23): DNP phosphoramidite base
  misc_feature (23)..(23): n is a, c, g, or t
  modified_base (44)..(44): DNP phosphoramidite base
  misc_feature (44)..(44): n is a, c, g, or t
  modified_base (65)..(65): DNP phosphoramidite base
  misc_feature (65)..(65): n is a, c, g, or t
  modified_base (86)..(86): DNP phosphoramidite base
  misc_feature (86)..(86): n is a, c, g, or t
tngatttcacacttctctccaanatgtaacactgtcacattgcnatttcctctctagatgtatanctgatagcactgggaaagatnt

SEQ ID NO: 382 - DNA, 87 bp, Artificial Sequence
  Synthetic Probe
  modified_base (2)..(2): DNP phosphoramidite base
  misc_feature (2)..(2): n is a, c, g, or t
  modified_base (23)..(23): DNP phosphoramidite base
  misc_feature (23)..(23): n is a, c, g, or t
  modified_base (44)..(44): DNP phosphoramidite base
  misc_feature (44)..(44): n is a, c, g, or t
  modified_base (65)..(65): DNP phosphoramidite base
  misc_feature (65)..(65): n is a, c, g, or t
  modified_base (86)..(86): DNP phosphoramidite base
  misc_feature (86)..(86): n is a, c, g, or t
tnaaacttagttccaaatatganaatgaaaaggaaagtccagcntatttaggggggtactcaaangtgtcaactgatcataaccant

SEQ ID NO: 383 - DNA, 87 bp, Artificial Sequence
  Synthetic Probe
  modified_base (2)..(2): DNP phosphoramidite base
  misc_feature (2)..(2): n is a, c, g, or t
  modified_base (23)..(23): DNP phosphoramidite base
  misc_feature (23)..(23): n is a, c, g, or t
  modified_base (44)..(44): DNP phosphoramidite base
  misc_feature (44)..(44): n is a, c, g, or t
  modified_base (65)..(65): DNP phosphoramidite base
  misc_feature (65)..(65): n is a, c, g, or t
  modified_base (86)..(86): DNP phosphoramidite base
  misc_feature (86)..(86): n is a, c, g, or t
tntgtatgtccaaaatatcagtngaaatctctaatctctggccnttcagattatctgtcccctcnaaaggactgaaagcaagcacnt

SEQ ID NO: 384 - DNA, 87 bp, Artificial Sequence
  Synthetic Probe
  modified_base (2)..(2): DNP phosphoramidite base
  misc_feature (2)..(2): n is a, c, g, or t
  modified_base (23)..(23): DNP phosphoramidite base
  misc_feature (23)..(23): n is a, c, g, or t
  modified_base (44)..(44): DNP phosphoramidite base
  misc_feature (44)..(44): n is a, c, g, or t
  modified_base (65)..(65): DNP phosphoramidite base
  misc_feature (65)..(65): n is a, c, g, or t
  modified_base (86)..(86): DNP phosphoramidite base
  misc_feature (86)..(86): n is a, c, g, or t
tnagtatatggcaaatgatgcantgagaaacaatgaactccccntcagaggtgccccacctgtcnaatgctcttaaacatgaagcnt

SEQ ID NO: 385 - DNA, 87 bp, Artificial Sequence
  Synthetic Probe
  modified_base (2)..(2): DNP phosphoramidite base
  misc_feature (2)..(2): n is a, c, g, or t
  modified_base (23)..(23): DNP phosphoramidite base
  misc_feature (23)..(23): n is a, c, g, or t
  modified_base (44)..(44): DNP phosphoramidite base
  misc_feature (44)..(44): n is a, c, g, or t
  modified_base (65)..(65): DNP phosphoramidite base
  misc_feature (65)..(65): n is a, c, g, or t
  modified_base (86)..(86): DNP phosphoramidite base
  misc_feature (86)..(86): n is a, c, g, or t
tngttgccacagccatgccatcnatcagttacacctaagcagcntcacacggttgtcatgaccangcaaggacacctgaaaaaaant

SEQ ID NO: 386 - DNA, 87 bp, Artificial Sequence
  Synthetic Probe
  modified_base (2)..(2): DNP phosphoramidite base
  misc_feature (2)..(2): n is a, c, g, or t
  modified_base (23)..(23): DNP phosphoramidite base
  misc_feature (23)..(23): n is a, c, g, or t
  modified_base (44)..(44): DNP phosphoramidite base
  misc_feature (44)..(44): n is a, c, g, or t
  modified_base (65)..(65): DNP phosphoramidite base
  misc_feature (65)..(65): n is a, c, g, or t
  modified_base (86)..(86): DNP phosphoramidite base
  misc_feature (86)..(86): n is a, c, g, or t
tnctcaacaaaaacaagattttncaatgaagttcactgaaggangcccttcaccacaggaacgancaaaaacgtaagaacaaagcnt

SEQ ID NO: 387 - DNA, 87 bp, Artificial Sequence
  Synthetic Probe
  modified_base (2)..(2): DNP phosphoramidite base
  misc_feature (2)..(2): n is a, c, g, or t
  modified_base (23)..(23): DNP phosphoramidite base
  misc_feature (23)..(23): n is a, c, g, or t
  modified_base (44)..(44): DNP phosphoramidite base
  misc_feature (44)..(44): n is a, c, g, or t
  modified_base (65)..(65): DNP phosphoramidite base
  misc_feature (65)..(65): n is a, c, g, or t
  modified_base (86)..(86): DNP phosphoramidite base
  misc_feature (86)..(86): n is a, c, g, or t
tnattcacaagtcaggatccaanttttaagttcaaagttccagnttgagccaacctgaaaccagncttgtaggcaaagcaaaactnt

SEQ ID NO: 388 - DNA, 87 bp, Artificial Sequence
  Synthetic Probe
  modified_base (2)..(2): DNP phosphoramidite base
  misc_feature (2)..(2): n is a, c, g, or t
  modified_base (23)..(23): DNP phosphoramidite base
  misc_feature (23)..(23): n is a, c, g, or t
  modified_base (44)..(44): DNP phosphoramidite base
  misc_feature (44)..(44): n is a, c, g, or t
  modified_base (65)..(65): DNP phosphoramidite base
  misc_feature (65)..(65): n is a, c, g, or t
  modified_base (86)..(86): DNP phosphoramidite base
  misc_feature (86)..(86): n is a, c, g, or t
tngaggaggggtaggtaaattanctaaatgtagttactttgggngagcagaaactatgggttggnggatgaagcaactgctgtgtnt

SEQ ID NO: 389 - DNA, 87 bp, Artificial Sequence
  Synthetic Probe
  modified_base (2)..(2): DNP phosphoramidite base
  misc_feature (2)..(2): n is a, c, g, or t
  modified_base (23)..(23): DNP phosphoramidite base
  misc_feature (23)..(23): n is a, c, g, or t
  modified_base (44)..(44): DNP phosphoramidite base
  misc_feature (44)..(44): n is a, c, g, or t
  modified_base (65)..(65): DNP phosphoramidite base
  misc_feature (65)..(65): n is a, c, g, or t
  modified_base (86)..(86): DNP phosphoramidite base
  misc_feature (86)..(86): n is a, c, g, or t
tntcttgtagaagctgcagaggnaggactcagggtatggggctnaagggaagcgacaggtctatngtcctgtcccatacaagatcnt

SEQ ID NO: 390 - DNA, 87 bp, Artificial Sequence
  Synthetic Probe
  modified_base (2)..(2): DNP phosphoramidite base
  misc_feature (2)..(2): n is a, c, g, or t
  modified_base (23)..(23): DNP phosphoramidite base
  misc_feature (23)..(23): n is a, c, g, or t
  modified_base (44)..(44): DNP phosphoramidite base
  misc_feature (44)..(44): n is a, c, g, or t
  modified_base (65)..(65): DNP phosphoramidite base
  misc_feature (65)..(65): n is a, c, g, or t
  modified_base (86)..(86): DNP phosphoramidite base
  misc_feature (86)..(86): n is a, c, g, or t
tntataaccacaaacaaaaggtnaacaacaaagaacatgatgangaaccatcgggttaccacttntccacaactccaagatgtccnt

SEQ ID NO: 391 - DNA, 87 bp, Artificial Sequence
  Synthetic Probe
  modified_base (2)..(2): DNP phosphoramidite base
  misc_feature (2)..(2): n is a, c, g, or t
  modified_base (23)..(23): DNP phosphoramidite base
  misc_feature (23)..(23): n is a, c, g, or t
  modified_base (44)..(44): DNP phosphoramidite base
  misc_feature (44)..(44): n is a, c, g, or t
  modified_base (65)..(65): DNP phosphoramidite base
  misc_feature (65)..(65): n is a, c, g, or t
  modified_base (86)..(86): DNP phosphoramidite base
  misc_feature (86)..(86): n is a, c, g, or t
tntccttttagcgtgtcccatancattacaattaaagtcatcgntaaccagccaacaagagacgncccactttttgagaaggctant

SEQ ID NO: 392 - DNA, 87 bp, Artificial Sequence
  Synthetic Probe
  modified_base (2)..(2): DNP phosphoramidite base
  misc_feature (2)..(2): n is a, c, g, or t
  modified_base (23)..(23): DNP phosphoramidite base
  misc_feature (23)..(23): n is a, c, g, or t
  modified_base (44)..(44): DNP phosphoramidite base
  misc_feature (44)..(44): n is a, c, g, or t
  modified_base (65)..(65): DNP phosphoramidite base
  misc_feature (65)..(65): n is a, c, g, or t
  modified_base (86)..(86): DNP phosphoramidite base
  misc_feature (86)..(86): n is a, c, g, or t
tntgatctgcacgaaggtcaaangagccggcaagtggcatcatncagagccagtggcgaaggcantatccatttgggaaaaactant

SEQ ID NO: 393 - DNA, 87 bp, Artificial Sequence
  Synthetic Probe
  modified_base (2)..(2): DNP phosphoramidite base
  misc_feature (2)..(2): n is a, c, g, or t
  modified_base (23)..(23): DNP phosphoramidite base
  misc_feature (23)..(23): n is a, c, g, or t
  modified_base (44)..(44): DNP phosphoramidite base
  misc_feature (44)..(44): n is a, c, g, or t
  modified_base (65)..(65): DNP phosphoramidite base
  misc_feature (65)..(65): n is a, c, g, or t
  modified_base (86)..(86): DNP phosphoramidite base
  misc_feature (86)..(86): n is a, c, g, or t
tncctgctctaaaactctattanttctaaccaggttggcctacnggcaaagaggtggggatgggngttagcacagcatttactttnt

SEQ ID NO: 394 - DNA, 87 bp, Artificial Sequence
  Synthetic Probe
  modified_base (2)..(2): DNP phosphoramidite base
  misc_feature (2)..(2): n is a, c, g, or t
  modified_base (23)..(23): DNP phosphoramidite base
  misc_feature (23)..(23): n is a, c, g, or t
  modified_base (44)..(44): DNP phosphoramidite base
  misc_feature (44)..(44): n is a, c, g, or t
  modified_base (65)..(65): DNP phosphoramidite base
  misc_feature (65)..(65): n is a, c, g, or t
  modified_base (86)..(86): DNP phosphoramidite base
  misc_feature (86)..(86): n is a, c, g, or t
tnttggcaattatggtacttttnggacattctagtcatatctgntactgtttggcatctgatctngcttaggtaacctaactcaant

SEQ ID NO: 395 - DNA, 87 bp, Artificial Sequence
  Synthetic Probe
  modified_base (2)..(2): DNP phosphoramidite base
  misc_feature (2)..(2): n is a, c, g, or t
  modified_base (23)..(23): DNP phosphoramidite base
  misc_feature (23)..(23): n is a, c, g, or t
  modified_base (44)..(44): DNP phosphoramidite base
  misc_feature (44)..(44): n is a, c, g, or t
  modified_base (65)..(65): DNP phosphoramidite base
  misc_feature (65)..(65): n is a, c, g, or t
  modified_base (86)..(86): DNP phosphoramidite base
  misc_feature (86)..(86): n is a, c, g, or t
tngttcactttggtcccagaaangacgagacttttttctcatcntgaattcactggtagaacatnccacgatctgcttgtttactnt

SEQ ID NO: 396 - DNA, 87 bp, Artificial Sequence
  Synthetic Probe
  modified_base (2)..(2): DNP phosphoramidite base
  misc_feature (2)..(2): n is a, c, g, or t
  modified_base (23)..(23): DNP phosphoramidite base
  misc_feature (23)..(23): n is a, c, g, or t
  modified_base (44)..(44): DNP phosphoramidite base
  misc_feature (44)..(44): n is a, c, g, or t
  modified_base (65)..(65): DNP phosphoramidite base
  misc_feature (65)..(65): n is a, c, g, or t
  modified_base (86)..(86): DNP phosphoramidite base
  misc_feature (86)..(86): n is a, c, g, or t
tnctattcacttacactgacagncattgatatctgagacatgtncccgtgaaagactgtctacancattccatctcgaatatcccnt

SEQ ID NO: 397 - DNA, 87 bp, Artificial Sequence
  Synthetic Probe
  modified_base (2)..(2): DNP phosphoramidite base
  misc_feature (2)..(2): n is a, c, g, or t
  modified_base (23)..(23): DNP phosphoramidite base
  misc_feature (23)..(23): n is a, c, g, or t
  modified_base (44)..(44): DNP phosphoramidite base
  misc_feature (44)..(44): n is a, c, g, or t
  modified_base (65)..(65): DNP phosphoramidite base
  misc_feature (65)..(65): n is a, c, g, or t
  modified_base (86)..(86): DNP phosphoramidite base
  misc_feature (86)..(86): n is a, c, g, or t
tnggactcaaagaaagactcatncacatctccagaatgcccagntgaatgtggtggtctgctggngcagtttcgatgtcccataant

SEQ ID NO: 398 - DNA, 87 bp, Artificial Sequence
  Synthetic Probe
  modified_base (2)..(2): DNP phosphoramidite base
  misc_feature (2)..(2): n is a, c, g, or t
  modified_base (23)..(23): DNP phosphoramidite base
  misc_feature (23)..(23): n is a, c, g, or t
  modified_base (44)..(44): DNP phosphoramidite base
  misc_feature (44)..(44): n is a, c, g, or t
  modified_base (65)..(65): DNP phosphoramidite base
  misc_feature (65)..(65): n is a, c, g, or t
  modified_base (86)..(86): DNP phosphoramidite base
  misc_feature (86)..(86): n is a, c, g, or t
tncaattacttcttcttatgtcnagttcctgctaccaccctcanaacccataatcagtgtgcttnctggaataaacttaccaagtnt

SEQ ID NO: 399 - DNA, 87 bp, Artificial Sequence
  Synthetic Probe
  modified_base (2)..(2): DNP phosphoramidite base
  misc_feature (2)..(2): n is a, c, g, or t
  modified_base (23)..(23): DNP phosphoramidite base
  misc_feature (23)..(23): n is a, c, g, or t
  modified_base (44)..(44): DNP phosphoramidite base
  misc_feature (44)..(44): n is a, c, g, or t
  modified_base (65)..(65): DNP phosphoramidite base
  misc_feature (65)..(65): n is a, c, g, or t
  modified_base (86)..(86): DNP phosphoramidite base
  misc_feature (86)..(86): n is a, c, g, or t
tntgtatctcctgaacttgtaancaatttggctgtcatctaaanaaacgacagcaggacaagtanccctacagcataaagagtagnt

SEQ ID NO: 400 - DNA, 87 bp, Artificial Sequence
  Synthetic Probe
  modified_base (2)..(2): DNP phosphoramidite base
  misc_feature (2)..(2): n is a, c, g, or t
  modified_base (23)..(23): DNP phosphoramidite base
  misc_feature (23)..(23): n is a, c, g, or t
  modified_base (44)..(44): DNP phosphoramidite base
  misc_feature (44)..(44): n is a, c, g, or t
  modified_base (65)..(65): DNP phosphoramidite base
  misc_feature (65)..(65): n is a, c, g, or t
  modified_base (86)..(86): DNP phosphoramidite base
  misc_feature (86)..(86): n is a, c, g, or t
tngattaacaccactaacccaantactacactattgaactatgnatgggcacactggcaaacaanagcaatacactatcatggtgnt

SEQ ID NO: 401 - DNA, 87 bp, Artificial Sequence
  Synthetic Probe
  modified_base (2)..(2): DNP phosphoramidite base
  misc_feature (2)..(2): n is a, c, g, or t
  modified_base (23)..(23): DNP phosphoramidite base
  misc_feature (23)..(23): n is a, c, g, or t
  modified_base (44)..(44): DNP phosphoramidite base
  misc_feature (44)..(44): n is a, c, g, or t
  modified_base (65)..(65): DNP phosphoramidite base
  misc_feature (65)..(65): n is a, c, g, or t
  modified_base (86)..(86): DNP phosphoramidite base
  misc_feature (86)..(86): n is a, c, g, or t
tntgttcataataatttcattcnccacccgattaatcctcatcnctttagccagccgagcacaantctgtcatttgtccttgatcnt

SEQ ID NO: 402 - DNA, 87 bp, Artificial Sequence
  Synthetic Probe
  modified_base (2)..(2): DNP phosphoramidite base
  misc_feature (2)..(2): n is a, c, g, or t
  modified_base (23)..(23): DNP phosphoramidite base
  misc_feature (23)..(23): n is a, c, g, or t
  modified_base (44)..(44): DNP phosphoramidite base
  misc_feature (44)..(44): n is a, c, g, or t
  modified_base (65)..(65): DNP phosphoramidite base
  misc_feature (65)..(65): n is a, c, g, or t
  modified_base (86)..(86): DNP phosphoramidite base
  misc_feature (86)..(86): n is a, c, g, or t
tnctcacctgtgtgacctggcanactctcggcttactctcacantttccctctctggtctttaangttatatatagagcagatgtnt

SEQ ID NO: 403 - DNA, 87 bp, Artificial Sequence
  Synthetic Probe
  modified_base (2)..(2): DNP phosphoramidite base
  misc_feature (2)..(2): n is a, c, g, or t
  modified_base (23)..(23): DNP phosphoramidite base
  misc_feature (23)..(23): n is a, c, g, or t
  modified_base (44)..(44): DNP phosphoramidite base
  misc_feature (44)..(44): n is a, c, g, or t
  modified_base (65)..(65): DNP phosphoramidite base
  misc_feature (65)..(65): n is a, c, g, or t
  modified_base (86)..(86): DNP phosphoramidite base
  misc_feature (86)..(86): n is a, c, g, or t
tnacataattaccagagggagcnataagcacaggtcatcacccnaggaggacctcaaaggaatangcatgcatctgtagggcacant

SEQ ID NO: 404 - DNA, 87 bp, Artificial Sequence
  Synthetic Probe
  modified_base (2)..(2): DNP phosphoramidite base
  misc_feature (2)..(2): n is a, c, g, or t
  modified_base (23)..(23): DNP phosphoramidite base
  misc_feature (23)..(23): n is a, c, g, or t
  modified_base (44)..(44): DNP phosphoramidite base
  misc_feature (44)..(44): n is a, c, g, or t
  modified_base (65)..(65): DNP phosphoramidite base
  misc_feature (65)..(65): n is a, c, g, or t
  modified_base (86)..(86): DNP phosphoramidite base
  misc_feature (86)..(86): n is a, c, g, or t
tncaagtatcagagtcgattacnatgagtcttccatgaaaagancaacactggcatccctctatntaataggcccttattctgggnt

SEQ ID NO: 405 - DNA, 87 bp, Artificial Sequence
  Synthetic Probe
  modified_base (2)..(2): DNP phosphoramidite base
  misc_feature (2)..(2): n is a, c, g, or t
  modified_base (23)..(23): DNP phosphoramidite base
  misc_feature (23)..(23): n is a, c, g, or t
  modified_base (44)..(44): DNP phosphoramidite base
  misc_feature (44)..(44): n is a, c, g, or t
  modified_base (65)..(65): DNP phosphoramidite base
  misc_feature (65)..(65): n is a, c, g, or t
  modified_base (86)..(86): DNP phosphoramidite base
  misc_feature (86)..(86): n is a, c, g, or t
tnatagttttttattgctctagnaaacaacactgtctgctgccnttgttaccctaacaccaatcnatttgaaggtcagatggaaant

SEQ ID NO: 406 - DNA, 87 bp, Artificial Sequence
  Synthetic Probe
  modified_base (2)..(2): DNP phosphoramidite base
  misc_feature (2)..(2): n is a, c, g, or t
  modified_base (23)..(23): DNP phosphoramidite base
  misc_feature (23)..(23): n is a, c, g, or t
  modified_base (44)..(44): DNP phosphoramidite base
  misc_feature (44)..(44): n is a, c, g, or t
  modified_base (65)..(65): DNP phosphoramidite base
  misc_feature (65)..(65): n is a, c, g, or t
  modified_base (86)..(86): DNP phosphoramidite base
  misc_feature (86)..(86): n is a, c, g, or t
tnaagtattcctgaagctttttncaccactcaactattttaaanctggggattccttccagtggnatgtattaggaccatccacant

SEQ ID NO: 407 - DNA, 87 bp, Artificial Sequence
  Synthetic Probe
  modified_base (2)..(2): DNP phosphoramidite base
  misc_feature (2)..(2): n is a, c, g, or t
  modified_base (23)..(23): DNP phosphoramidite base
  misc_feature (23)..(23): n is a, c, g, or t
  modified_base (44)..(44): DNP phosphoramidite base
  misc_feature (44)..(44): n is a, c, g, or t
  modified_base (65)..(65): DNP phosphoramidite base
  misc_feature (65)..(65): n is a, c, g, or t
  modified_base (86)..(86): DNP phosphoramidite base
  misc_feature (86)..(86): n is a, c, g, or t
tnctccaatctactgtatcttcntaaaaagtccagaagcacaanatcagtgcctggagcgggccnaaagaagagcttcccactagnt

SEQ ID NO: 408 - DNA, 87 bp, Artificial Sequence
  Synthetic Probe
  modified_base (2)..(2): DNP phosphoramidite base
  misc_feature (2)..(2): n is a, c, g, or t
  modified_base (23)..(23): DNP phosphoramidite base
  misc_feature (23)..(23): n is a, c, g, or t
  modified_base (44)..(44): DNP phosphoramidite base
  misc_feature (44)..(44): n is a, c, g, or t
  modified_base (65)..(65): DNP phosphoramidite base
  misc_feature (65)..(65): n is a, c, g, or t
  modified_base (86)..(86): DNP phosphoramidite base
  misc_feature (86)..(86): n is a, c, g, or t
tngatatacagaagaaaatttanaaaagcaccttcctgggcctnatcatcagccacccagttccntttccctagaggtaaataacnt

SEQ ID NO: 409 - DNA, 87 bp, Artificial Sequence
  Synthetic Probe
  modified_base (2)..(2): DNP phosphoramidite base
  misc_feature (2)..(2): n is a, c, g, or t
  modified_base (23)..(23): DNP phosphoramidite base
  misc_feature (23)..(23): n is a, c, g, or t
  modified_base (44)..(44): DNP phosphoramidite base
  misc_feature (44)..(44): n is a, c, g, or t
  modified_base (65)..(65): DNP phosphoramidite base
  misc_feature (65)..(65): n is a, c, g, or t
  modified_base (86)..(86): DNP phosphoramidite base
  misc_feature (86)..(86): n is a, c, g, or t
tntgaatgacagtgatgagcaantctatctaactgtaggccacngtagcagctgtgcgtgtgccntgtgcacctgcagatggtcant

SEQ ID NO: 410 - DNA, 87 bp, Artificial Sequence
  Synthetic Probe
  modified_base (2)..(2): DNP phosphoramidite base
  misc_feature (2)..(2): n is a, c, g, or t
  modified_base (23)..(23): DNP phosphoramidite base
  misc_feature (23)..(23): n is a, c, g, or t
  modified_base (44)..(44): DNP phosphoramidite base
  misc_feature (44)..(44): n is a, c, g, or t
  modified_base (65)..(65): DNP phosphoramidite base
  misc_feature (65)..(65): n is a, c, g, or t
  modified_base (86)..(86): DNP phosphoramidite base
  misc_feature (86)..(86): n is a, c, g, or t
tntccccaatgcatagcataganttttagctaggtggcccctcnagtgtacgtcttgttcgcatnttgtattcgacccacagagtnt

SEQ ID NO: 411 - DNA, 87 bp, Artificial Sequence
  Synthetic Probe
  modified_base (2)..(2): DNP phosphoramidite base
  misc_feature (2)..(2): n is a, c, g, or t
  modified_base (23)..(23): DNP phosphoramidite base
  misc_feature (23)..(23): n is a, c, g, or t
  modified_base (44)..(44): DNP phosphoramidite base
  misc_feature (44)..(44): n is a, c, g, or t
  modified_base (65)..(65): DNP phosphoramidite base
  misc_feature (65)..(65): n is a, c, g, or t
  modified_base (86)..(86): DNP phosphoramidite base
  misc_feature (86)..(86): n is a, c, g, or t
tntgggtgcagtaacatcgaatntcagagatgagtctgcgaagnccttctgtgattatcccaggncaaaatacatctctcctttgnt

SEQ ID NO: 412 - DNA, 87 bp, Artificial Sequence
  Synthetic Probe
  modified_base (2)..(2): DNP phosphoramidite base
  misc_feature (2)..(2): n is a, c, g, or t
  modified_base (23)..(23): DNP phosphoramidite base
  misc_feature (23)..(23): n is a, c, g, or t
  modified_base (44)..(44): DNP phosphoramidite base
  misc_feature (44)..(44): n is a, c, g, or t
  modified_base (65)..(65): DNP phosphoramidite base
  misc_feature (65)..(65): n is a, c, g, or t
  modified_base (86)..(86): DNP phosphoramidite base
  misc_feature (86)..(86): n is a, c, g, or t
tnttacctgaatctgattccgcnagttgttctgcttcttgcctncaactgttccagttcgctcanttttttcaatttgtttacctnt

SEQ ID NO: 413 - DNA, 87 bp, Artificial Sequence
  Synthetic Probe
  modified_base (2)..(2): DNP phosphoramidite base
  misc_feature (2)..(2): n is a, c, g, or t
  modified_base (23)..(23): DNP phosphoramidite base
  misc_feature (23)..(23): n is a, c, g, or t
  modified_base (44)..(44): DNP phosphoramidite base
  misc_feature (44)..(44): n is a, c, g, or t
  modified_base (65)..(65): DNP phosphoramidite base
  misc_feature (65)..(65): n is a, c, g, or t
  modified_base (86)..(86): DNP phosphoramidite base
  misc_feature (86)..(86): n is a, c, g, or t
tnacaggaatattactacctcanaaaagacactagaggctaganaactgggagtattctttctcntacctgtcctggtctcttttnt

SEQ ID NO: 414 - DNA, 87 bp, Artificial Sequence
  Synthetic Probe
  modified_base (2)..(2): DNP phosphoramidite base
  misc_feature (2)..(2): n is a, c, g, or t
  modified_base (23)..(23): DNP phosphoramidite base
  misc_feature (23)..(23): n is a, c, g, or t
  modified_base (44)..(44): DNP phosphoramidite base
  misc_feature (44)..(44): n is a, c, g, or t
  modified_base (65)..(65): DNP phosphoramidite base
  misc_feature (65)..(65): n is a, c, g, or t
  modified_base (86)..(86): DNP phosphoramidite base
  misc_feature (86)..(86): n is a, c, g, or t
tnaagcctataactttttaggtncaagattgtagcccgaaatgnactgtcctaagtccaaattcnctataaaagattgattccccnt

SEQ ID NO: 415 - DNA, 87 bp, Artificial Sequence
  Synthetic Probe
  modified_base (2)..(2): DNP phosphoramidite base
  misc_feature (2)..(2): n is a, c, g, or t
  modified_base (23)..(23): DNP phosphoramidite base
  misc_feature (23)..(23): n is a, c, g, or t
  modified_base (44)..(44): DNP phosphoramidite base
  misc_feature (44)..(44): n is a, c, g, or t
  modified_base (65)..(65): DNP phosphoramidite base
  misc_feature (65)..(65): n is a, c, g, or t
  modified_base (86)..(86): DNP phosphoramidite base
  misc_feature (86)..(86): n is a, c, g, or t
tncctgataaagtttgattgttntaacaatttagtatgcatctncagagagggccagactggacnagattacagccggtctggaant

SEQ ID NO: 416 - DNA, 87 bp, Artificial Sequence
  Synthetic Probe
  modified_base (2)..(2): DNP phosphoramidite base
  misc_feature (2)..(2): n is a, c, g, or t
  modified_base (23)..(23): DNP phosphoramidite base
  misc_feature (23)..(23): n is a, c, g, or t
  modified_base (44)..(44): DNP phosphoramidite base
  misc_feature (44)..(44): n is a, c, g, or t
  modified_base (65)..(65): DNP phosphoramidite base
  misc_feature (65)..(65): n is a, c, g, or t
  modified_base (86)..(86): DNP phosphoramidite base
  misc_feature (86)..(86): n is a, c, g, or t
tnctgaagtgaagacaagcagcnatgcgggctctttaaagccgncaaccttagctgcccttgctngaccattcctgagatatcccnt

SEQ ID NO: 417 - DNA, 87 bp, Artificial Sequence
  Synthetic Probe
  modified_base (2)..(2): DNP phosphoramidite base
  misc_feature (2)..(2): n is a, c, g, or t
  modified_base (23)..(23): DNP phosphoramidite base
  misc_feature (23)..(23): n is a, c, g, or t
  modified_base (44)..(44): DNP phosphoramidite base
  misc_feature (44)..(44): n is a, c, g, or t
  modified_base (65)..(65): DNP phosphoramidite base
  misc_feature (65)..(65): n is a, c, g, or t
  modified_base (86)..(86): DNP phosphoramidite base
  misc_feature (86)..(86): n is a, c, g, or t
tnaacattttgggtaagcacaanctagtttacatccctcctacntaactaaaacactagaaaganactatcgagggaccctaaagnt

SEQ ID NO: 418 - DNA, 87 bp, Artificial Sequence
  Synthetic Probe
  modified_base (2)..(2): DNP phosphoramidite base
  misc_feature (2)..(2): n is a, c, g, or t
  modified_base (23)..(23): DNP phosphoramidite base
  misc_feature (23)..(23): n is a, c, g, or t
  modified_base (44)..(44): DNP phosphoramidite base
  misc_feature (44)..(44): n is a, c, g, or t
  modified_base (65)..(65): DNP phosphoramidite base
  misc_feature (65)..(65): n is a, c, g, or t
  modified_base (86)..(86): DNP phosphoramidite base
  misc_feature (86)..(86): n is a, c, g, or t
tngagttacttgggataaactantgatctgtaccaaatgaatgnagaatttccaggctgagtgcnccctaaggatggaggtaccant

SEQ ID NO: 419 - DNA, 87 bp, Artificial Sequence
  Synthetic Probe
  modified_base (2)..(2): DNP phosphoramidite base
  misc_feature (2)..(2): n is a, c, g, or t
  modified_base (23)..(23): DNP phosphoramidite base
  misc_feature (23)..(23): n is a, c, g, or t
  modified_base (44)..(44): DNP phosphoramidite base
  misc_feature (44)..(44): n is a, c, g, or t
  modified_base (65)..(65): DNP phosphoramidite base
  misc_feature (65)..(65): n is a, c, g, or t
  modified_base (86)..(86): DNP phosphoramidite base
  misc_feature (86)..(86): n is a, c, g, or t
tncaggtgaagcctaatatggcnaagtcctagtaaatatgtttntgaaggtaaggatccaaagtnggccaaactgtattgacatgnt

SEQ ID NO: 420 - DNA, 87 bp, Artificial Sequence
  Synthetic Probe
  modified_base (2)..(2): DNP phosphoramidite base
  misc_feature (2)..(2): n is a, c, g, or t
  modified_base (23)..(23): DNP phosphoramidite base
  misc_feature (23)..(23): n is a, c, g, or t
  modified_base (44)..(44): DNP phosphoramidite base
  misc_feature (44)..(44): n is a, c, g, or t
  modified_base (65)..(65): DNP phosphoramidite base
  misc_feature (65)..(65): n is a, c, g, or t
  modified_base (86)..(86): DNP phosphoramidite base
  misc_feature (86)..(86): n is a, c, g, or t
tnttacatcaggtatagtttagntaagtagctccctcaggctgntttatcagaagcatgcgtaanattcagggaagggcaggtttnt

SEQ ID NO: 421 - DNA, 87 bp, Artificial Sequence
  Synthetic Probe
  modified_base (2)..(2): DNP phosphoramidite base
  misc_feature (2)..(2): n is a, c, g, or t
  modified_base (23)..(23): DNP phosphoramidite base
  misc_feature (23)..(23): n is a, c, g, or t
  modified_base (44)..(44): DNP phosphoramidite base
  misc_feature (44)..(44): n is a, c, g, or t
  modified_base (65)..(65): DNP phosphoramidite base
  misc_feature (65)..(65): n is a, c, g, or t
  modified_base (86)..(86): DNP phosphoramidite base
  misc_feature (86)..(86): n is a, c, g, or t
tnttaaggacacattttgacagncagaagagaaagtcatctaanccacttgccctcctgcagttncctttacatccatagtttaant

SEQ ID NO: 422 - DNA, 87 bp, Artificial Sequence
  Synthetic Probe
  modified_base (2)..(2): DNP phosphoramidite base
  misc_feature (2)..(2): n is a, c, g, or t
  modified_base (23)..(23): DNP phosphoramidite base
  misc_feature (23)..(23): n is a, c, g, or t
  modified_base (44)..(44): DNP phosphoramidite base
  misc_feature (44)..(44): n is a, c, g, or t
  modified_base (65)..(65): DNP phosphoramidite base
  misc_feature (65)..(65): n is a, c, g, or t
  modified_base (86)..(86): DNP phosphoramidite base
  misc_feature (86)..(86): n is a, c, g, or t
tnaagttttccatctacactagnttataggcaaaacagaaaatntgagtgggacttctcccaatnaacacagatctgataaatgant

SEQ ID NO: 423 - DNA, 87 bp, Artificial Sequence
  Synthetic Probe
  modified_base (2)..(2): DNP phosphoramidite base
  misc_feature (2)..(2): n is a, c, g, or t
  modified_base (23)..(23): DNP phosphoramidite base
  misc_feature (23)..(23): n is a, c, g, or t
  modified_base (44)..(44): DNP phosphoramidite base
  misc_feature (44)..(44): n is a, c, g, or t
  modified_base (65)..(65): DNP phosphoramidite base
  misc_feature (65)..(65): n is a, c, g, or t
  modified_base (86)..(86): DNP phosphoramidite base
  misc_feature (86)..(86): n is a, c, g, or t
tnaatggccttctcactccatgntcttagaatgtccacagaacnttttactgaagcaaggcattnatgcaggctgtacaattatant

SEQ ID NO: 424 - DNA, 87 bp, Artificial Sequence
  Synthetic Probe
  modified_base (2)..(2): DNP phosphoramidite base
  misc_feature (2)..(2): n is a, c, g, or t
  modified_base (23)..(23): DNP phosphoramidite base
  misc_feature (23)..(23): n is a, c, g, or t
  modified_base (44)..(44): DNP phosphoramidite base
  misc_feature (44)..(44): n is a, c, g, or t
  modified_base (65)..(65): DNP phosphoramidite base
  misc_feature (65)..(65): n is a, c, g, or t
  modified_base (86)..(86): DNP phosphoramidite base
  misc_feature (86)..(86): n is a, c, g, or t
tntgcccacccaccccaagtgtntccatacaaagacatctccancgtggctttctttctcagganagttagtcaaaaccgtacagnt

SEQ ID NO: 425 - DNA, 87 bp, Artificial Sequence
  Synthetic Probe
  modified_base (2)..(2): DNP phosphoramidite base
  misc_feature (2)..(2): n is a, c, g, or t
  modified_base (23)..(23): DNP phosphoramidite base
  misc_feature (23)..(23): n is a, c, g, or t
  modified_base (44)..(44): DNP phosphoramidite base
  misc_feature (44)..(44): n is a, c, g, or t
  modified_base (65)..(65): DNP phosphoramidite base
  misc_feature (65)..(65): n is a, c, g, or t
  modified_base (86)..(86): DNP phosphoramidite base
  misc_feature (86)..(86): n is a, c, g, or t
tnaccccttgtgaactgaaggtnaggctgttttgtgttccaggnaaataaataaggcactgctcntccagtctatttcccttcacnt

SEQ ID NO: 426 - DNA, 87 bp, Artificial Sequence
  Synthetic Probe
  modified_base (2)..(2): DNP phosphoramidite base
  misc_feature (2)..(2): n is a, c, g, or t
  modified_base (23)..(23): DNP phosphoramidite base
  misc_feature (23)..(23): n is a, c, g, or t
  modified_base (44)..(44): DNP phosphoramidite base
  misc_feature (44)..(44): n is a, c, g, or t
  modified_base (65)..(65): DNP phosphoramidite base
  misc_feature (65)..(65): n is a, c, g, or t
  modified_base (86)..(86): DNP phosphoramidite base
  misc_feature (86)..(86): n is a, c, g, or t
tnttctgggagaggactaaaacnaatccatgagcactgtttcantttgcaccaggactctcctanttgaggggtagaggagagtgnt

SEQ ID NO: 427 - DNA, 87 bp, Artificial Sequence
  Synthetic Probe
  modified_base (2)..(2): DNP phosphoramidite base
  misc_feature (2)..(2): n is a, c, g, or t
  modified_base (23)..(23): DNP phosphoramidite base
  misc_feature (23)..(23): n is a, c, g, or t
  modified_base (44)..(44): DNP phosphoramidite base
  misc_feature (44)..(44): n is a, c, g, or t
  modified_base (65)..(65): DNP phosphoramidite base
  misc_feature (65)..(65): n is a, c, g, or t
  modified_base (86)..(86): DNP phosphoramidite base
  misc_feature (86)..(86): n is a, c, g, or t
tnctttctcaaactacatccacnatcctgaagatttaaatactntgccccacctcattagcagcnacctgactctgtggcccatcnt

SEQ ID NO: 428 - DNA, 87 bp, Artificial Sequence
  Synthetic Probe
  modified_base (2)..(2): DNP phosphoramidite base
  misc_feature (2)..(2): n is a, c, g, or t
  modified_base (23)..(23): DNP phosphoramidite base
  misc_feature (23)..(23): n is a, c, g, or t
  modified_base (44)..(44): DNP phosphoramidite base
  misc_feature (44)..(44): n is a, c, g, or t
  modified_base (65)..(65): DNP phosphoramidite base
  misc_feature (65)..(65): n is a, c, g, or t
  modified_base (86)..(86): DNP phosphoramidite base
  misc_feature (86)..(86): n is a, c, g, or t
tnttagaggttttagttaacaangcaagtgtacttatggtgatnactgttctgagatgagcagantatccatctctgctacctcant

SEQ ID NO: 429 - DNA, 87 bp, Artificial Sequence
  Synthetic Probe
  modified_base (2)..(2): DNP phosphoramidite base
  misc_feature (2)..(2): n is a, c, g, or t
  modified_base (23)..(23): DNP phosphoramidite base
  misc_feature (23)..(23): n is a, c, g, or t
  modified_base (44)..(44): DNP phosphoramidite base
  misc_feature (44)..(44): n is a, c, g, or t
  modified_base (65)..(65): DNP phosphoramidite base
  misc_feature (65)..(65): n is a, c, g, or t
  modified_base (86)..(86): DNP phosphoramidite base
  misc_feature (86)..(86): n is a, c, g, or t
tnctgaagttatttgggattctnatcccatccccaattctctanccccaccactaatgttctcgngaatctatcattcaaagggtnt

SEQ ID NO: 430 - DNA, 87 bp, Artificial Sequence
  Synthetic Probe
  modified_base (2)..(2): DNP phosphoramidite base
  misc_feature (2)..(2): n is a, c, g, or t
  modified_base (23)..(23): DNP phosphoramidite base
  misc_feature (23)..(23): n is a, c, g, or t
  modified_base (44)..(44): DNP phosphoramidite base
  misc_feature (44)..(44): n is a, c, g, or t
  modified_base (65)..(65): DNP phosphoramidite base
  misc_feature (65)..(65): n is a, c, g, or t
  modified_base (86)..(86): DNP phosphoramidite base
  misc_feature (86)..(86): n is a, c, g, or t
tnacgtttttatcctacaacacntctctatcacatataccaagnactgctcttcaatgccttaangggaacacacaatccccccgnt

SEQ ID NO: 431 - DNA, 87 bp, Artificial Sequence
  Synthetic Probe
  modified_base (2)..(2): DNP phosphoramidite base
  misc_feature (2)..(2): n is a, c, g, or t
  modified_base (23)..(23): DNP phosphoramidite base
  misc_feature (23)..(23): n is a, c, g, or t
  modified_base (44)..(44): DNP phosphoramidite base
  misc_feature (44)..(44): n is a, c, g, or t
  modified_base (65)..(65): DNP phosphoramidite base
  misc_feature (65)..(65): n is a, c, g, or t
  modified_base (86)..(86): DNP phosphoramidite base
  misc_feature (86)..(86): n is a, c, g, or t
tnatgatatcttctgagcgaatntcttttttagagggttcctanctgcaagtaagacaagcatcntcagtgggagtttgtccttant

SEQ ID NO: 432 - DNA, 87 bp, Artificial Sequence
  Synthetic Probe
  modified_base (2)..(2): DNP phosphoramidite base
  misc_feature (2)..(2): n is a, c, g, or t
  modified_base (23)..(23): DNP phosphoramidite base
  misc_feature (23)..(23): n is a, c, g, or t
  modified_base (44)..(44): DNP phosphoramidite base
  misc_feature (44)..(44): n is a, c, g, or t
  modified_base (65)..(65): DNP phosphoramidite base
  misc_feature (65)..(65): n is a, c, g, or t
  modified_base (86)..(86): DNP phosphoramidite base
  misc_feature (86)..(86): n is a, c, g, or t
tngaggaacacacactgtgaacnttaccaagcatttttctgtcncataactattgctccaaaggnaaattctccggtccctgtacnt

SEQ ID NO: 433 - DNA, 87 bp, Artificial Sequence
  Synthetic Probe
  modified_base (2)..(2): DNP phosphoramidite base
  misc_feature (2)..(2): n is a, c, g, or t
  modified_base (23)..(23): DNP phosphoramidite base
  misc_feature (23)..(23): n is a, c, g, or t
  modified_base (44)..(44): DNP phosphoramidite base
  misc_feature (44)..(44): n is a, c, g, or t
  modified_base (65)..(65): DNP phosphoramidite base
  misc_feature (65)..(65): n is a, c, g, or t
  modified_base (86)..(86): DNP phosphoramidite base
  misc_feature (86)..(86): n is a, c, g, or t
tnctgtagcagcatcaccaaacnaccttacgtagcactaacgcntgtaagattctctggaaaccngtcttctccatttgaaacggnt

SEQ ID NO: 434 - DNA, 87 bp, Artificial Sequence
  Synthetic Probe
  modified_base (2)..(2): DNP phosphoramidite base
  misc_feature (2)..(2): n is a, c, g, or t
  modified_base (23)..(23): DNP phosphoramidite base
  misc_feature (23)..(23): n is a, c, g, or t
  modified_base (44)..(44): DNP phosphoramidite base
  misc_feature (44)..(44): n is a, c, g, or t
  modified_base (65)..(65): DNP phosphoramidite base
  misc_feature (65)..(65): n is a, c, g, or t
  modified_base (86)..(86): DNP phosphoramidite base
  misc_feature (86)..(86): n is a, c, g, or t
tntaagccatcactacctattanatatcaataggatacactgtngccctggcaaaagggaggttnttgaacttggaacaagacatnt

SEQ ID NO: 435 - DNA, 87 bp, Artificial Sequence
  Synthetic Probe
  modified_base (2)..(2): DNP phosphoramidite base
  misc_feature (2)..(2): n is a, c, g, or t
  modified_base (23)..(23): DNP phosphoramidite base
  misc_feature (23)..(23): n is a, c, g, or t
  modified_base (44)..(44): DNP phosphoramidite base
  misc_feature (44)..(44): n is a, c, g, or t
  modified_base (65)..(65): DNP phosphoramidite base
  misc_feature (65)..(65): n is a, c, g, or t
  modified_base (86)..(86): DNP phosphoramidite base
  misc_feature (86)..(86): n is a, c, g, or t
tntgatgatacagccagctgacnttcaataacatgcctaagagnaaatcacaccatctcaggcangtatttggtaaggccagaagnt

SEQ ID NO: 436 - DNA, 87 bp, Artificial Sequence
  Synthetic Probe
  modified_base (2)..(2): DNP phosphoramidite base
  misc_feature (2)..(2): n is a, c, g, or t
  modified_base (23)..(23): DNP phosphoramidite base
  misc_feature (23)..(23): n is a, c, g, or t
  modified_base (44)..(44): DNP phosphoramidite base
  misc_feature (44)..(44): n is a, c, g, or t
  modified_base (65)..(65): DNP phosphoramidite base
  misc_feature (65)..(65): n is a, c, g, or t
  modified_base (86)..(86): DNP phosphoramidite base
  misc_feature (86)..(86): n is a, c, g, or t
tnttaaaatgaacaatggcagangactcgaagcacacaattttngaatgcacctaatcagccgtncctcctctccgactagaaatnt

SEQ ID NO: 437 - DNA, 87 bp, Artificial Sequence
  Synthetic Probe
  modified_base (2)..(2): DNP phosphoramidite base
  misc_feature (2)..(2): n is a, c, g, or t
  modified_base (23)..(23): DNP phosphoramidite base
  misc_feature (23)..(23): n is a, c, g, or t
  modified_base (44)..(44): DNP phosphoramidite base
  misc_feature (44)..(44): n is a, c, g, or t
  modified_base (65)..(65): DNP phosphoramidite base
  misc_feature (65)..(65): n is a, c, g, or t
  modified_base (86)..(86): DNP phosphoramidite base
  misc_feature (86)..(86): n is a, c, g, or t
tnaacttccctcccatcttaaanttaagtagcgtgtgttctgtnctctgtcctagaagatgtacnttaatggtcataaactctgtnt

SEQ ID NO: 438 - DNA, 87 bp, Artificial Sequence
  Synthetic Probe
  modified_base (2)..(2): DNP phosphoramidite base
  misc_feature (2)..(2): n is a, c, g, or t
  modified_base (23)..(23): DNP phosphoramidite base
  misc_feature (23)..(23): n is a, c, g, or t
  modified_base (44)..(44): DNP phosphoramidite base
  misc_feature (44)..(44): n is a, c, g, or t
  modified_base (65)..(65): DNP phosphoramidite base
  misc_feature (65)..(65): n is a, c, g, or t
  modified_base (86)..(86): DNP phosphoramidite base
  misc_feature (86)..(86): n is a, c, g, or t
tnacaattaaattttgaacgttnttaagaaaacttcccgctaangccacacgccaagctactttngtcggtggctgagagggagant

SEQ ID NO: 439 - DNA, 87 bp, Artificial Sequence
  Synthetic Probe
  modified_base (2)..(2): DNP phosphoramidite base
  misc_feature (2)..(2): n is a, c, g, or t
  modified_base (23)..(23): DNP phosphoramidite base
  misc_feature (23)..(23): n is a, c, g, or t
  modified_base (44)..(44): DNP phosphoramidite base
  misc_feature (44)..(44): n is a, c, g, or t
  modified_base (65)..(65): DNP phosphoramidite base
  misc_feature (65)..(65): n is a, c, g, or t
  modified_base (86)..(86): DNP phosphoramidite base
  misc_feature (86)..(86): n is a, c, g, or t
tntatgagtcttccaagcactcntccacccaacagccctgctgnggcagtcccgaatacccgttnattttgggggcacgcacgggnt

SEQ ID NO: 440 - DNA, 87 bp, Artificial Sequence
  Synthetic Probe
  modified_base (2)..(2): DNP phosphoramidite base
  misc_feature (2)..(2): n is a, c, g, or t
  modified_base (23)..(23): DNP phosphoramidite base
  misc_feature (23)..(23): n is a, c, g, or t
  modified_base (44)..(44): DNP phosphoramidite base
  misc_feature (44)..(44): n is a, c, g, or t
  modified_base (65)..(65): DNP phosphoramidite base
  misc_feature (65)..(65): n is a, c, g, or t
  modified_base (86)..(86): DNP phosphoramidite base
  misc_feature (86)..(86): n is a, c, g, or t
tnaaacagccctgggtagcgaanaactgcagaggagttctttgntggagtttctgtgccggaganaatgttcgaacaatatcatcnt

SEQ ID NO: 441 - DNA, 87 bp, Artificial Sequence
  Synthetic Probe
  modified_base (2)..(2): DNP phosphoramidite base
  misc_feature (2)..(2): n is a, c, g, or t
  modified_base (23)..(23): DNP phosphoramidite base
  misc_feature (23)..(23): n is a, c, g, or t
  modified_base (44)..(44): DNP phosphoramidite base
  misc_feature (44)..(44): n is a, c, g, or t
  modified_base (65)..(65): DNP phosphoramidite base
  misc_feature (65)..(65): n is a, c, g, or t
  modified_base (86)..(86): DNP phosphoramidite base
  misc_feature (86)..(86): n is a, c, g, or t
tnaatctattagtcccttgaaangaggtgatgccatgataaacnacaccctgtttgtgactgtgngggaaaatgtgaccgttttgnt

SEQ ID NO: 442 - DNA, 87 bp, Artificial Sequence
  Synthetic Probe
  modified_base (2)..(2): DNP phosphoramidite base
  misc_feature (2)..(2): n is a, c, g, or t
  modified_base (23)..(23): DNP phosphoramidite base
  misc_feature (23)..(23): n is a, c, g, or t
  modified_base (44)..(44): DNP phosphoramidite base
  misc_feature (44)..(44): n is a, c, g, or t
  modified_base (65)..(65): DNP phosphoramidite base
  misc_feature (65)..(65): n is a, c, g, or t
  modified_base (86)..(86): DNP phosphoramidite base
  misc_feature (86)..(86): n is a, c, g, or t
tngagaaaggtgaaggggtatgnctattaacatttctgatgccntgctggtttgtgtagacaatntgtagagatgtatcctacttnt

SEQ ID NO: 443 - DNA, 87 bp, Artificial Sequence
  Synthetic Probe
  modified_base (2)..(2): DNP phosphoramidite base
  misc_feature (2)..(2): n is a, c, g, or t
  modified_base (23)..(23): DNP phosphoramidite base
  misc_feature (23)..(23): n is a, c, g, or t
  modified_base (44)..(44): DNP phosphoramidite base
  misc_feature (44)..(44): n is a, c, g, or t
  modified_base (65)..(65): DNP phosphoramidite base
  misc_feature (65)..(65): n is a, c, g, or t
  modified_base (86)..(86): DNP phosphoramidite base
  misc_feature (86)..(86): n is a, c, g, or t
tncctcaccccatcccacacgcntagtcagaatcataggagagngagaaagtggtcattgctttntctaggagtttagttacagtnt

SEQ ID NO: 444 - DNA, 87 bp, Artificial Sequence
  Synthetic Probe
  modified_base (2)..(2): DNP phosphoramidite base
  misc_feature (2)..(2): n is a, c, g, or t
  modified_base (23)..(23): DNP phosphoramidite base
  misc_feature (23)..(23): n is a, c, g, or t
  modified_base (44)..(44): DNP phosphoramidite base
  misc_feature (44)..(44): n is a, c, g, or t
  modified_base (65)..(65): DNP phosphoramidite base
  misc_feature (65)..(65): n is a, c, g, or t
  modified_base (86)..(86): DNP phosphoramidite base
  misc_feature (86)..(86): n is a, c, g, or t
tnatcaagttcagagaagctctngctcttggtcctacattggantgaatctgaatgctgtactcnagtgagctaccctgtaatccnt

SEQ ID NO: 445 - DNA, 87 bp, Artificial Sequence
  Synthetic Probe
  modified_base (2)..(2): DNP phosphoramidite base
  misc_feature (2)..(2): n is a, c, g, or t
  modified_base (23)..(23): DNP phosphoramidite base
  misc_feature (23)..(23): n is a, c, g, or t
  modified_base (44)..(44): DNP phosphoramidite base
  misc_feature (44)..(44): n is a, c, g, or t
  modified_base (65)..(65): DNP phosphoramidite base
  misc_feature (65)..(65): n is a, c, g, or t
  modified_base (86)..(86): DNP phosphoramidite base
  misc_feature (86)..(86): n is a, c, g, or t
tnttttctgagcctaccttgctnctcagacgatgccaagcacanccgtgaagaacacagctattnaaagtgtacaatatttcagtnt

SEQ ID NO: 446 - DNA, 87 bp, Artificial Sequence
  Synthetic Probe
  modified_base (2)..(2): DNP phosphoramidite base
  misc_feature (2)..(2): n is a, c, g, or t
  modified_base (23)..(23): DNP phosphoramidite base
  misc_feature (23)..(23): n is a, c, g, or t
  modified_base (44)..(44): DNP phosphoramidite base
  misc_feature (44)..(44): n is a, c, g, or t
  modified_base (65)..(65): DNP phosphoramidite base
  misc_feature (65)..(65): n is a, c, g, or t
  modified_base (86)..(86): DNP phosphoramidite base
  misc_feature (86)..(86): n is a, c, g, or t
tnagacagacatccttgatacangagtagtcatgcctaaagccnttccctcttgctcacacacanatgcattttccatatcaaagnt

SEQ ID NO: 447 - DNA, 87 bp, Artificial Sequence
  Synthetic Probe
  modified_base (2)..(2): DNP phosphoramidite base
  misc_feature (2)..(2): n is a, c, g, or t
  modified_base (23)..(23): DNP phosphoramidite base
  misc_feature (23)..(23): n is a, c, g, or t
  modified_base (44)..(44): DNP phosphoramidite base
  misc_feature (44)..(44): n is a, c, g, or t
  modified_base (65)..(65): DNP phosphoramidite base
  misc_feature (65)..(65): n is a, c, g, or t
  modified_base (86)..(86): DNP phosphoramidite base
  misc_feature (86)..(86): n is a, c, g, or t
tntgtttatttccactcaggttnctcgttaaccatgggaatttnggaatctgtcatccaagtgcnatcccagtgaccttaagagant

SEQ ID NO: 448 - DNA, 87 bp, Artificial Sequence
  Synthetic Probe
  modified_base (2)..(2): DNP phosphoramidite base
  misc_feature (2)..(2): n is a, c, g, or t
  modified_base (23)..(23): DNP phosphoramidite base
  misc_feature (23)..(23): n is a, c, g, or t
  modified_base (44)..(44): DNP phosphoramidite base
  misc_feature (44)..(44): n is a, c, g, or t
  modified_base (65)..(65): DNP phosphoramidite base
  misc_feature (65)..(65): n is a, c, g, or t
  modified_base (86)..(86): DNP phosphoramidite base
  misc_feature (86)..(86): n is a, c, g, or t
tnactaatcaatcgtggactctntgccctgtaagcttcatttcnatcccaagaactcttctgaancaccacattttcaaaaggaant

SEQ ID NO: 449 - DNA, 87 bp, Artificial Sequence
  Synthetic Probe
  modified_base (2)..(2): DNP phosphoramidite base
  misc_feature (2)..(2): n is a, c, g, or t
  modified_base (23)..(23): DNP phosphoramidite base
  misc_feature (23)..(23): n is a, c, g, or t
  modified_base (44)..(44): DNP phosphoramidite base
  misc_feature (44)..(44): n is a, c, g, or t
  modified_base (65)..(65): DNP phosphoramidite base
  misc_feature (65)..(65): n is a, c, g, or t
  modified_base (86)..(86): DNP phosphoramidite base
  misc_feature (86)..(86): n is a, c, g, or t
tncaaatagttttctgatggaanacgattgctttgaactgatanccaagccacatagaccagacnttcagactctacttaggaggnt

SEQ ID NO: 450 - DNA, 87 bp, Artificial Sequence
  Synthetic Probe
  modified_base (2)..(2): DNP phosphoramidite base
  misc_feature (2)..(2): n is a, c, g, or t
  modified_base (23)..(23): DNP phosphoramidite base
  misc_feature (23)..(23): n is a, c, g, or t
  modified_base (44)..(44): DNP phosphoramidite base
  misc_feature (44)..(44): n is a, c, g, or t
  modified_base (65)..(65): DNP phosphoramidite base
  misc_feature (65)..(65): n is a, c, g, or t
  modified_base (86)..(86): DNP phosphoramidite base
  misc_feature (86)..(86): n is a, c, g, or t
tntcagaggtttataattggatngactattttatgccaaactcntctctctggggtctcactcantttcttatcacattctagccnt

SEQ ID NO: 451 - DNA, 87 bp, Artificial Sequence
  Synthetic Probe
  modified_base (2)..(2): DNP phosphoramidite base
  misc_feature (2)..(2): n is a, c, g, or t
  modified_base (23)..(23): DNP phosphoramidite base
  misc_feature (23)..(23): n is a, c, g, or t
  modified_base (44)..(44): DNP phosphoramidite base
  misc_feature (44)..(44): n is a, c, g, or t
  modified_base (65)..(65): DNP phosphoramidite base
  misc_feature (65)..(65): n is a, c, g, or t
  modified_base (86)..(86): DNP phosphoramidite base
  misc_feature (86)..(86): n is a, c, g, or t
tnattttcttcaattaatgaggngagcaaatgaatgcagaactnctaagggacagtctctgggangctccattcattcattcttcnt

SEQ ID NO: 452 - DNA, 87 bp, Artificial Sequence
  Synthetic Probe
  modified_base (2)..(2): DNP phosphoramidite base
  misc_feature (2)..(2): n is a, c, g, or t
  modified_base (23)..(23): DNP phosphoramidite base
  misc_feature (23)..(23): n is a, c, g, or t
  modified_base (44)..(44): DNP phosphoramidite base
  misc_feature (44)..(44): n is a, c, g, or t
  modified_base (65)..(65): DNP phosphoramidite base
  misc_feature (65)..(65): n is a, c, g, or t
  modified_base (86)..(86): DNP phosphoramidite base
  misc_feature (86)..(86): n is a, c, g, or t
tncgtggggtggaagtggaacantgagttccaagacttgggacnggtttttacaattttcctttncacttcgaggtagtaacattnt

SEQ ID NO: 453 - DNA, 87 bp, Artificial Sequence
  Synthetic Probe
  modified_base (2)..(2): DNP phosphoramidite base
  misc_feature (2)..(2): n is a, c, g, or t
  modified_base (23)..(23): DNP phosphoramidite base
  misc_feature (23)..(23): n is a, c, g, or t
  modified_base (44)..(44): DNP phosphoramidite base
  misc_feature (44)..(44): n is a, c, g, or t
  modified_base (65)..(65): DNP phosphoramidite base
  misc_feature (65)..(65): n is a, c, g, or t
  modified_base (86)..(86): DNP phosphoramidite base
  misc_feature (86)..(86): n is a, c, g, or t
tngtccgcagtttttaagtgttnctttgggaaaacacagccctnttgaattggagccacagtatntggcagggtaatgatgatttnt

SEQ ID NO: 454 - DNA, 87 bp, Artificial Sequence
  Synthetic Probe
  modified_base (2)..(2): DNP phosphoramidite base
  misc_feature (2)..(2): n is a, c, g, or t
  modified_base (23)..(23): DNP phosphoramidite base
  misc_feature (23)..(23): n is a, c, g, or t
  modified_base (44)..(44): DNP phosphoramidite base
  misc_feature (44)..(44): n is a, c, g, or t
  modified_base (65)..(65): DNP phosphoramidite base
  misc_feature (65)..(65): n is a, c, g, or t
  modified_base (86)..(86): DNP phosphoramidite base
  misc_feature (86)..(86): n is a, c, g, or t
tnaggaaagagtgtgctcactgntgcaaatgaaactccagaagncttcagcaacactgcagcccnctgcgactctcctatattcant

SEQ ID NO: 455 - DNA, 87 bp, Artificial Sequence
  Synthetic Probe
  modified_base (2)..(2): DNP phosphoramidite base
  misc_feature (2)..(2): n is a, c, g, or t
  modified_base (23)..(23): DNP phosphoramidite base
  misc_feature (23)..(23): n is a, c, g, or t
  modified_base (44)..(44): DNP phosphoramidite base
  misc_feature (44)..(44): n is a, c, g, or t
  modified_base (65)..(65): DNP phosphoramidite base
  misc_feature (65)..(65): n is a, c, g, or t
  modified_base (86)..(86): DNP phosphoramidite base
  misc_feature (86)..(86): n is a, c, g, or t
tnatcaaacagctggtaaatggntggcacagacatatggagccnagaactttctgacctgatgcnttgggtgtgttcctattcctnt

SEQ ID NO: 456 - DNA, 87 bp, Artificial Sequence
  Synthetic Probe
  modified_base (2)..(2): DNP phosphoramidite base
  misc_feature (2)..(2): n is a, c, g, or t
  modified_base (23)..(23): DNP phosphoramidite base
  misc_feature (23)..(23): n is a, c, g, or t
  modified_base (44)..(44): DNP phosphoramidite base
  misc_feature (44)..(44): n is a, c, g, or t
  modified_base (65)..(65): DNP phosphoramidite base
  misc_feature (65)..(65): n is a, c, g, or t
  modified_base (86)..(86): DNP phosphoramidite base
  misc_feature (86)..(86): n is a, c, g, or t
tnatttcctgctaaataaatcangagcagagtctccagtaaatngaatgcctcagaagtttctcntgtctcaccagttggatctcnt

SEQ ID NO: 457 - DNA, 87 bp, Artificial Sequence
  Synthetic Probe
  modified_base (2)..(2): DNP phosphoramidite base
  misc_feature (2)..(2): n is a, c, g, or t
  modified_base (23)..(23): DNP phosphoramidite base
  misc_feature (23)..(23): n is a, c, g, or t
  modified_base (44)..(44): DNP phosphoramidite base
  misc_feature (44)..(44): n is a, c, g, or t
  modified_base (65)..(65): DNP phosphoramidite base
  misc_feature (65)..(65): n is a, c, g, or t
  modified_base (86)..(86): DNP phosphoramidite base
  misc_feature (86)..(86): n is a, c, g, or t
tnatcccagagacttcaccaatntcattcaatctggaaacatcnagttgctcagctaatcttttncccctcttttcccattatcant

SEQ ID NO: 458 - DNA, 87 bp, Artificial Sequence
  Synthetic Probe
  modified_base (2)..(2): DNP phosphoramidite base
  misc_feature (2)..(2): n is a, c, g, or t
  modified_base (23)..(23): DNP phosphoramidite base
  misc_feature (23)..(23): n is a, c, g, or t
  modified_base (44)..(44): DNP phosphoramidite base
  misc_feature (44)..(44): n is a, c, g, or t
  modified_base (65)..(65): DNP phosphoramidite base
  misc_feature (65)..(65): n is a, c, g, or t
  modified_base (86)..(86): DNP phosphoramidite base
  misc_feature (86)..(86): n is a, c, g, or t
tntgcactgctccatcttacttntctgagtttcatggacgttcntcattgcaaatgagtctgtgnttagggagtttgtattttctnt

SEQ ID NO: 459 - DNA, 87 bp, Artificial Sequence
  Synthetic Probe
  modified_base (2)..(2): DNP phosphoramidite base
  misc_feature (2)..(2): n is a, c, g, or t
  modified_base (23)..(23): DNP phosphoramidite base
  misc_feature (23)..(23): n is a, c, g, or t
  modified_base (44)..(44): DNP phosphoramidite base
  misc_feature (44)..(44): n is a, c, g, or t
  modified_base (65)..(65): DNP phosphoramidite base
  misc_feature (65)..(65): n is a, c, g, or t
  modified_base (86)..(86): DNP phosphoramidite base
  misc_feature (86)..(86): n is a, c, g, or t
tntattagcattgcatgaaggtnaagtgtattttctgtagaganctgaccctagggcagctgcancaaatctctgcaaggaggttnt

SEQ ID NO: 460 - DNA, 87 bp, Artificial Sequence
  Synthetic Probe
  modified_base (2)..(2): DNP phosphoramidite base
  misc_feature (2)..(2): n is a, c, g, or t
  modified_base (23)..(23): DNP phosphoramidite base
  misc_feature (23)..(23): n is a, c, g, or t
  modified_base (44)..(44): DNP phosphoramidite base
  misc_feature (44)..(44): n is a, c, g, or t
  modified_base (65)..(65): DNP phosphoramidite base
  misc_feature (65)..(65): n is a, c, g, or t
  modified_base (86)..(86): DNP phosphoramidite base
  misc_feature (86)..(86): n is a, c, g, or t
tntcaagtccacaaagccatgtnctggtttgcccatagaacacnatcccttcttgtttctgatcntttgcagtacttggtctaaant

SEQ ID NO: 461 - DNA, 87 bp, Artificial Sequence
  Synthetic Probe
  modified_base (2)..(2): DNP phosphoramidite base
  misc_feature (2)..(2): n is a, c, g, or t
  modified_base (23)..(23): DNP phosphoramidite base
  misc_feature (23)..(23): n is a, c, g, or t
  modified_base (44)..(44): DNP phosphoramidite base
  misc_feature (44)..(44): n is a, c, g, or t
  modified_base (65)..(65): DNP phosphoramidite base
  misc_feature (65)..(65): n is a, c, g, or t
  modified_base (86)..(86): DNP phosphoramidite base
  misc_feature (86)..(86): n is a, c, g, or t
tnctgggtcaggaagcaatgtcncgtagtcactcgaaacaaagnctcctgagagtcaataagtcnaacacacttctctctgagtcnt

SEQ ID NO: 462 - DNA, 87 bp, Artificial Sequence
  Synthetic Probe
  modified_base (2)..(2): DNP phosphoramidite base
  misc_feature (2)..(2): n is a, c, g, or t
  modified_base (23)..(23): DNP phosphoramidite base
  misc_feature (23)..(23): n is a, c, g, or t
  modified_base (44)..(44): DNP phosphoramidite base
  misc_feature (44)..(44): n is a, c, g, or t
  modified_base (65)..(65): DNP phosphoramidite base
  misc_feature (65)..(65): n is a, c, g, or t
  modified_base (86)..(86): DNP phosphoramidite base
  misc_feature (86)..(86): n is a, c, g, or t
tnggcagcccttcctgggcaaantgctagttaccttcatggtcntctttcagcccttcatagagntctcttaaattattgttaccnt

SEQ ID NO: 463 - DNA, 87 bp, Artificial Sequence
  Synthetic Probe
  modified_base (2)..(2): DNP phosphoramidite base
  misc_feature (2)..(2): n is a, c, g, or t
  modified_base (23)..(23): DNP phosphoramidite base
  misc_feature (23)..(23): n is a, c, g, or t
  modified_base (44)..(44): DNP phosphoramidite base
  misc_feature (44)..(44): n is a, c, g, or t
  modified_base (65)..(65): DNP phosphoramidite base
  misc_feature (65)..(65): n is a, c, g, or t
  modified_base (86)..(86): DNP phosphoramidite base
  misc_feature (86)..(86): n is a, c, g, or t
tnaaacatactaatgttaagatnggttacaagaaagttctgaanagtgacggacggcatcttctnctgccttccttatactgaggnt

SEQ ID NO: 464 - DNA, 87 bp, Artificial Sequence
  Synthetic Probe
  modified_base (2)..(2): DNP phosphoramidite base
  misc_feature (2)..(2): n is a, c, g, or t
  modified_base (23)..(23): DNP phosphoramidite base
  misc_feature (23)..(23): n is a, c, g, or t
  modified_base (44)..(44): DNP phosphoramidite base
  misc_feature (44)..(44): n is a, c, g, or t
  modified_base (65)..(65): DNP phosphoramidite base
  misc_feature (65)..(65): n is a, c, g, or t
  modified_base (86)..(86): DNP phosphoramidite base
  misc_feature (86)..(86): n is a, c, g, or t
tntacttttgatggagcattctnaacacttttttcctactcacntgccactgatttaagtgaccnctccaaggacaccaaattcant

SEQ ID NO: 465 - DNA, 87 bp, Artificial Sequence
  Synthetic Probe
  modified_base (2)..(2): DNP phosphoramidite base
  misc_feature (2)..(2): n is a, c, g, or t
  modified_base (23)..(23): DNP phosphoramidite base
  misc_feature (23)..(23): n is a, c, g, or t
  modified_base (44)..(44): DNP phosphoramidite base
  misc_feature (44)..(44): n is a, c, g, or t
  modified_base (65)..(65): DNP phosphoramidite base
  misc_feature (65)..(65): n is a, c, g, or t
  modified_base (86)..(86): DNP phosphoramidite base
  misc_feature (86)..(86): n is a, c, g, or t
tngttcaagagtgcaattgtgcntacacttctctattatatganaattacccagcactggcaatntactgtctttggcttggaggnt

SEQ ID NO: 466 - DNA, 87 bp, Artificial Sequence
  Synthetic Probe
  modified_base (2)..(2): DNP phosphoramidite base
  misc_feature (2)..(2): n is a, c, g, or t
  modified_base (23)..(23): DNP phosphoramidite base
  misc_feature (23)..(23): n is a, c, g, or t
  modified_base (44)..(44): DNP phosphoramidite base
  misc_feature (44)..(44): n is a, c, g, or t
  modified_base (65)..(65): DNP phosphoramidite base
  misc_feature (65)..(65): n is a, c, g, or t
  modified_base (86)..(86): DNP phosphoramidite base
  misc_feature (86)..(86): n is a, c, g, or t
tngaaaacaatacattttttgcntaagttgctaaagtgaaagcnactgcagcactgaagtagcanagagtctacagttaagtatcnt

SEQ ID NO: 467 - DNA, 87 bp, Artificial Sequence
  Synthetic Probe
  modified_base (2)..(2): DNP phosphoramidite base
  misc_feature (2)..(2): n is a, c, g, or t
  modified_base (23)..(23): DNP phosphoramidite base
  misc_feature (23)..(23): n is a, c, g, or t
  modified_base (44)..(44): DNP phosphoramidite base
  misc_feature (44)..(44): n is a, c, g, or t
  modified_base (65)..(65): DNP phosphoramidite base
  misc_feature (65)..(65): n is a, c, g, or t
  modified_base (86)..(86): DNP phosphoramidite base
  misc_feature (86)..(86): n is a, c, g, or t
tncagtcattttgccaagcgaantggagaagcattttcctgatntcactaaggtcgtcctgtgangccaattggttagttcaactnt

SEQ ID NO: 468 - DNA, 87 bp, Artificial Sequence
  Synthetic Probe
  modified_base (2)..(2): DNP phosphoramidite base
  misc_feature (2)..(2): n is a, c, g, or t
  modified_base (23)..(23): DNP phosphoramidite base
  misc_feature (23)..(23): n is a, c, g, or t
  modified_base (44)..(44): DNP phosphoramidite base
  misc_feature (44)..(44): n is a, c, g, or t
  modified_base (65)..(65): DNP phosphoramidite base
  misc_feature (65)..(65): n is a, c, g, or t
  modified_base (86)..(86): DNP phosphoramidite base
  misc_feature (86)..(86): n is a, c, g, or t
tntggcaataacaacttacaagntgcatagctctgaacactttntccatatactgtctctctttnagctcagtctttacttctccnt

SEQ ID NO: 469 - DNA, 87 bp, Artificial Sequence
  Synthetic Probe
  modified_base (2)..(2): DNP phosphoramidite base
  misc_feature (2)..(2): n is a, c, g, or t
  modified_base (23)..(23): DNP phosphoramidite base
  misc_feature (23)..(23): n is a, c, g, or t
  modified_base (44)..(44): DNP phosphoramidite base
  misc_feature (44)..(44): n is a, c, g, or t
  modified_base (65)..(65): DNP phosphoramidite base
  misc_feature (65)..(65): n is a, c, g, or t
  modified_base (86)..(86): DNP phosphoramidite base
  misc_feature (86)..(86): n is a, c, g, or t
tnctgccatcattctcaaggtcnctggctttttctaggaggatncctggaaataaggatcctctncggaggatcctgcacagctcnt

SEQ ID NO: 470 - DNA, 87 bp, Artificial Sequence
  Synthetic Probe
  modified_base (2)..(2): DNP phosphoramidite base
  misc_feature (2)..(2): n is a, c, g, or t
  modified_base (23)..(23): DNP phosphoramidite base
  misc_feature (23)..(23): n is a, c, g, or t
  modified_base (44)..(44): DNP phosphoramidite base
  misc_feature (44)..(44): n is a, c, g, or t
  modified_base (65)..(65): DNP phosphoramidite base
  misc_feature (65)..(65): n is a, c, g, or t
  modified_base (86)..(86): DNP phosphoramidite base
  misc_feature (86)..(86): n is a, c, g, or t
tnaaactcccacagatttaacanctggccttttcttgcccatangaatttatctcctggtcagtncagtctctacctgattttcant

SEQ ID NO: 471 - DNA, 87 bp, Artificial Sequence
  Synthetic Probe
  modified_base (2)..(2): DNP phosphoramidite base
  misc_feature (2)..(2): n is a, c, g, or t
  modified_base (23)..(23): DNP phosphoramidite base
  misc_feature (23)..(23): n is a, c, g, or t
  modified_base (44)..(44): DNP phosphoramidite base
  misc_feature (44)..(44): n is a, c, g, or t
  modified_base (65)..(65): DNP phosphoramidite base
  misc_feature (65)..(65): n is a, c, g, or t
  modified_base (86)..(86): DNP phosphoramidite base
  misc_feature (86)..(86): n is a, c, g, or t
tntgtcaaatatattttgctcanatcaactgctccaaaacaaangtcgacgtgattcactctgangagtgcatagtttcaactacnt

SEQ ID NO: 472 - DNA, 87 bp, Artificial Sequence
  Synthetic Probe
  modified_base (2)..(2): DNP phosphoramidite base
  misc_feature (2)..(2): n is a, c, g, or t
  modified_base (23)..(23): DNP phosphoramidite base
  misc_feature (23)..(23): n is a, c, g, or t
  modified_base (44)..(44): DNP phosphoramidite base
  misc_feature (44)..(44): n is a, c, g, or t
  modified_base (65)..(65): DNP phosphoramidite base
  misc_feature (65)..(65): n is a, c, g, or t
  modified_base (86)..(86): DNP phosphoramidite base
  misc_feature (86)..(86): n is a, c, g, or t
tncttgagacattgaggctgtangttcctctctactaagacgcntaattattcccactgttttgnaagggtagagccacctctacnt

SEQ ID NO: 473 - DNA, 87 bp, Artificial Sequence
  Synthetic Probe
  modified_base (2)..(2): DNP phosphoramidite base
  misc_feature (2)..(2): n is a, c, g, or t
  modified_base (23)..(23): DNP phosphoramidite base
  misc_feature (23)..(23): n is a, c, g, or t
  modified_base (44)..(44): DNP phosphoramidite base
  misc_feature (44)..(44): n is a, c, g, or t
  modified_base (65)..(65): DNP phosphoramidite base
  misc_feature (65)..(65): n is a, c, g, or t
  modified_base (86)..(86): DNP phosphoramidite base
  misc_feature (86)..(86): n is a, c, g, or t
tnaacaaattgatttcaacctanagatttagaattggttaaccnctctagcagggccaaatatantgacccttcgggttctgttcnt

SEQ ID NO: 474 - DNA, 87 bp, Artificial Sequence
  Synthetic Probe
  modified_base (2)..(2): DNP phosphoramidite base
  misc_feature (2)..(2): n is a, c, g, or t
  modified_base (23)..(23): DNP phosphoramidite base
  misc_feature (23)..(23): n is a, c, g, or t
  modified_base (44)..(44): DNP phosphoramidite base
  misc_feature (44)..(44): n is a, c, g, or t
  modified_base (65)..(65): DNP phosphoramidite base
  misc_feature (65)..(65): n is a, c, g, or t
  modified_base (86)..(86): DNP phosphoramidite base
  misc_feature (86)..(86): n is a, c, g, or t
tntacttctctggtaatactttngaccagtactaggtggagtgntatttttctcctcttaacctnccgaattgcactgtcttgcant

SEQ ID NO: 475 - DNA, 87 bp, Artificial Sequence
  Synthetic Probe
  modified_base (2)..(2): DNP phosphoramidite base
  misc_feature (2)..(2): n is a, c, g, or t
  modified_base (23)..(23): DNP phosphoramidite base
  misc_feature (23)..(23): n is a, c, g, or t
  modified_base (44)..(44): DNP phosphoramidite base
  misc_feature (44)..(44): n is a, c, g, or t
  modified_base (65)..(65): DNP phosphoramidite base
  misc_feature (65)..(65): n is a, c, g, or t
  modified_base (86)..(86): DNP phosphoramidite base
  misc_feature (86)..(86): n is a, c, g, or t
tnataggattccaaaggaatttncaagaggagctcctggtgacnataggacaagttttgatcctngtttcactgatgtgacagagnt

SEQ ID NO: 476 - DNA, 87 bp, Artificial Sequence
  Synthetic Probe
  modified_base (2)..(2): DNP phosphoramidite base
  misc_feature (2)..(2): n is a, c, g, or t
  modified_base (23)..(23): DNP phosphoramidite base
  misc_feature (23)..(23): n is a, c, g, or t
  modified_base (44)..(44): DNP phosphoramidite base
  misc_feature (44)..(44): n is a, c, g, or t
  modified_base (65)..(65): DNP phosphoramidite base
  misc_feature (65)..(65): n is a, c, g, or t
  modified_base (86)..(86): DNP phosphoramidite base
  misc_feature (86)..(86): n is a, c, g, or t
tnaagagagaatctgaggaggtntgacactggccagcccatttnttaaaaacaaaagttttgccnccaaatccagcaagctgagtnt

SEQ ID NO: 477 - DNA, 87 bp, Artificial Sequence
  Synthetic Probe
  modified_base (2)..(2): DNP phosphoramidite base
  misc_feature (2)..(2): n is a, c, g, or t
  modified_base (23)..(23): DNP phosphoramidite base
  misc_feature (23)..(23): n is a, c, g, or t
  modified_base (44)..(44): DNP phosphoramidite base
  misc_feature (44)..(44): n is a, c, g, or t
  modified_base (65)..(65): DNP phosphoramidite base
  misc_feature (65)..(65): n is a, c, g, or t
  modified_base (86)..(86): DNP phosphoramidite base
  misc_feature (86)..(86): n is a, c, g, or t
tnagtgactctctcagttgagtnaagctctggaagtagcagatnagctggaggcagcctacaggngaggagtaaaaagctattccnt

SEQ ID NO: 478 - DNA, 87 bp, Artificial Sequence
  Synthetic Probe
  modified_base (2)..(2): DNP phosphoramidite base
  misc_feature (2)..(2): n is a, c, g, or t
  modified_base (23)..(23): DNP phosphoramidite base
  misc_feature (23)..(23): n is a, c, g, or t
  modified_base (44)..(44): DNP phosphoramidite base
  misc_feature (44)..(44): n is a, c, g, or t
  modified_base (65)..(65): DNP phosphoramidite base
  misc_feature (65)..(65): n is a, c, g, or t
  modified_base (86)..(86): DNP phosphoramidite base
  misc_feature (86)..(86): n is a, c, g, or t
tntatgtccatggctttatctcncaacaaagacagcctctgtcnatactgagatgtggccagccnatttgttctctagcggtgaant

SEQ ID NO: 479 - DNA, 87 bp, Artificial Sequence
  Synthetic Probe
  modified_base (2)..(2): DNP phosphoramidite base
  misc_feature (2)..(2): n is a, c, g, or t
  modified_base (23)..(23): DNP phosphoramidite base
  misc_feature (23)..(23): n is a, c, g, or t
  modified_base (44)..(44): DNP phosphoramidite base
  misc_feature (44)..(44): n is a, c, g, or t
  modified_base (65)..(65): DNP phosphoramidite base
  misc_feature (65)..(65): n is a, c, g, or t
  modified_base (86)..(86): DNP phosphoramidite base
  misc_feature (86)..(86): n is a, c, g, or t
tntgtttctattccaagaccctntataattaagactgttggaangcatgatgtcacagctcccangtgttatctagtgccagcaant

SEQ ID NO: 480 - DNA, 87 bp, Artificial Sequence
  Synthetic Probe
  modified_base (2)..(2): DNP phosphoramidite base
  misc_feature (2)..(2): n is a, c, g, or t
  modified_base (23)..(23): DNP phosphoramidite base
  misc_feature (23)..(23): n is a, c, g, or t
  modified_base (44)..(44): DNP phosphoramidite base
  misc_feature (44)..(44): n is a, c, g, or t
  modified_base (65)..(65): DNP phosphoramidite base
  misc_feature (65)..(65): n is a, c, g, or t
  modified_base (86)..(86): DNP phosphoramidite base
  misc_feature (86)..(86): n is a, c, g, or t
tngaactcccagatcgttccaangcagactttttccccatgtcnatcatagtcagtttccagggnatgagtgggacagtcaagttnt

SEQ ID NO: 481 - DNA, 87 bp, Artificial Sequence
  Synthetic Probe
  modified_base (2)..(2): DNP phosphoramidite base
  misc_feature (2)..(2): n is a, c, g, or t
  modified_base (23)..(23): DNP phosphoramidite base
  misc_feature (23)..(23): n is a, c, g, or t
  modified_base (44)..(44): DNP phosphoramidite base
  misc_feature (44)..(44): n is a, c, g, or t
  modified_base (65)..(65): DNP phosphoramidite base
  misc_feature (65)..(65): n is a, c, g, or t
  modified_base (86)..(86): DNP phosphoramidite base
  misc_feature (86)..(86): n is a, c, g, or t
tnatgctgatccagtgtttaggnacctgctaaaaggttgtgaanactctttgtgactctaagccncatctcccacctccagcctant

SEQ ID NO: 482 - DNA, 87 bp, Artificial Sequence
  Synthetic Probe
  modified_base (2)..(2): DNP phosphoramidite base
  misc_feature (2)..(2): n is a, c, g, or t
  modified_base (23)..(23): DNP phosphoramidite base
  misc_feature (23)..(23): n is a, c, g, or t
  modified_base (44)..(44): DNP phosphoramidite base
  misc_feature (44)..(44): n is a, c, g, or t
  modified_base (65)..(65): DNP phosphoramidite base
  misc_feature (65)..(65): n is a, c, g, or t
  modified_base (86)..(86): DNP phosphoramidite base
  misc_feature (86)..(86): n is a, c, g, or t
tnctaacctgcagtgaacagcanacagtctaggagagaaggagnccagcacctgttacaggcctnataccaatacggcatcagtant

SEQ ID NO: 483 - DNA, 87 bp, Artificial Sequence
  Synthetic Probe
  modified_base (2)..(2): DNP phosphoramidite base
  misc_feature (2)..(2): n is a, c, g, or t
  modified_base (23)..(23): DNP phosphoramidite base
  misc_feature (23)..(23): n is a, c, g, or t
  modified_base (44)..(44): DNP phosphoramidite base
  misc_feature (44)..(44): n is a, c, g, or t
  modified_base (65)..(65): DNP phosphoramidite base
  misc_feature (65)..(65): n is a, c, g, or t
  modified_base (86)..(86): DNP phosphoramidite base
  misc_feature (86)..(86): n is a, c, g, or t
tnagcagaccctctcatcgcaanagctccaaacgtagatctganttgagagctatggaagagagnaaggagctttaaactgaatgnt

SEQ ID NO: 484 - DNA, 87 bp, Artificial Sequence
  Synthetic Probe
  modified_base (2)..(2): DNP phosphoramidite base
  misc_feature (2)..(2): n is a, c, g, or t
  modified_base (23)..(23): DNP phosphoramidite base
  misc_feature (23)..(23): n is a, c, g, or t
  modified_base (44)..(44): DNP phosphoramidite base
  misc_feature (44)..(44): n is a, c, g, or t
  modified_base (65)..(65): DNP phosphoramidite base
  misc_feature (65)..(65): n is a, c, g, or t
  modified_base (86)..(86): DNP phosphoramidite base
  misc_feature (86)..(86): n is a, c, g, or t
tnaaaatatacatatccacaggnaatttagagctgaggtggatntttattcctgctctcaatgangtcggtgtctctccatgtgant

SEQ ID NO: 485 - DNA, 87 bp, Artificial Sequence
  Synthetic Probe
  modified_base (2)..(2): DNP phosphoramidite base
  misc_feature (2)..(2): n is a, c, g, or t
  modified_base (23)..(23): DNP phosphoramidite base
  misc_feature (23)..(23): n is a, c, g, or t
  modified_base (44)..(44): DNP phosphoramidite base
  misc_feature (44)..(44): n is a, c, g, or t
  modified_base (65)..(65): DNP phosphoramidite base
  misc_feature (65)..(65): n is a, c, g, or t
  modified_base (86)..(86): DNP phosphoramidite base
  misc_feature (86)..(86): n is a, c, g, or t
tntttataaaagaaaacttgaancgaacttagttcactagcccnctgaaactctctggggcttcnagaattcattcacactgaagnt

SEQ ID NO: 486 - DNA, 87 bp, Artificial Sequence
  Synthetic Probe
  modified_base (2)..(2): DNP phosphoramidite base
  misc_feature (2)..(2): n is a, c, g, or t
  modified_base (23)..(23): DNP phosphoramidite base
  misc_feature (23)..(23): n is a, c, g, or t
  modified_base (44)..(44): DNP phosphoramidite base
  misc_feature (44)..(44): n is a, c, g, or t
  modified_base (65)..(65): DNP phosphoramidite base
  misc_feature (65)..(65): n is a, c, g, or t
  modified_base (86)..(86): DNP phosphoramidite base
  misc_feature (86)..(86): n is a, c, g, or t
tnaactccacctgattccctccntcatagctcctcagcctccanacctgttgcttctccttctgntgttcccattctgaggaaatnt

SEQ ID NO: 487 - DNA, 87 bp, Artificial Sequence
  Synthetic Probe
  modified_base (2)..(2): DNP phosphoramidite base
  misc_feature (2)..(2): n is a, c, g, or t
  modified_base (23)..(23): DNP phosphoramidite base
  misc_feature (23)..(23): n is a, c, g, or t
  modified_base (44)..(44): DNP phosphoramidite base
  misc_feature (44)..(44): n is a, c, g, or t
  modified_base (65)..(65): DNP phosphoramidite base
  misc_feature (65)..(65): n is a, c, g, or t
  modified_base (86)..(86): DNP phosphoramidite base
  misc_feature (86)..(86): n is a, c, g, or t
tnattgtcatcaggtctctgtcntctttatctgccaaactgtgnacactccaggcatattgaaanaatccgtagttgttggaacant

SEQ ID NO: 488 - DNA, 87 bp, Artificial Sequence
  Synthetic Probe
  modified_base (2)..(2): DNP phosphoramidite base
  misc_feature (2)..(2): n is a, c, g, or t
  modified_base (23)..(23): DNP phosphoramidite base
  misc_feature (23)..(23): n is a, c, g, or t
  modified_base (44)..(44): DNP phosphoramidite base
  misc_feature (44)..(44): n is a, c, g, or t
  modified_base (65)..(65): DNP phosphoramidite base
  misc_feature (65)..(65): n is a, c, g, or t
  modified_base (86)..(86): DNP phosphoramidite base
  misc_feature (86)..(86): n is a, c, g, or t
tnaaacaaaatggagaagtctanagttgaccaattttgatactngagaggttgggagagttgaangcactgagaacagaaacggant

SEQ ID NO: 489 - DNA, 87 bp, Artificial Sequence
  Synthetic Probe
  modified_base (2)..(2): DNP phosphoramidite base
  misc_feature (2)..(2): n is a, c, g, or t
  modified_base (23)..(23): DNP phosphoramidite base
  misc_feature (23)..(23): n is a, c, g, or t
  modified_base (44)..(44): DNP phosphoramidite base
  misc_feature (44)..(44): n is a, c, g, or t
  modified_base (65)..(65): DNP phosphoramidite base
  misc_feature (65)..(65): n is a, c, g, or t
  modified_base (86)..(86): DNP phosphoramidite base
  misc_feature (86)..(86): n is a, c, g, or t
tngccctaggggttgacgttctncaagtcatggtcatcccacgncagtctccacgtagacaactncaatatgcaactactccatgnt

SEQ ID NO: 490 - DNA, 87 bp, Artificial Sequence
  Synthetic Probe
  modified_base (2)..(2): DNP phosphoramidite base
  misc_feature (2)..(2): n is a, c, g, or t
  modified_base (23)..(23): DNP phosphoramidite base
  misc_feature (23)..(23): n is a, c, g, or t
  modified_base (44)..(44): DNP phosphoramidite base
  misc_feature (44)..(44): n is a, c, g, or t
  modified_base (65)..(65): DNP phosphoramidite base
  misc_feature (65)..(65): n is a, c, g, or t
  modified_base (86)..(86): DNP phosphoramidite base
  misc_feature (86)..(86): n is a, c, g, or t
tnatattaagactatcaagcctntagcaagcaaaagatcacatnctgtccctgcagatgtgtttnttgtaccacttggcatacaant

SEQ ID NO: 491 - DNA, 87 bp, Artificial Sequence
  Synthetic Probe
  modified_base (2)..(2): DNP phosphoramidite base
  misc_feature (2)..(2): n is a, c, g, or t
  modified_base (23)..(23): DNP phosphoramidite base
  misc_feature (23)..(23): n is a, c, g, or t
  modified_base (44)..(44): DNP phosphoramidite base
  misc_feature (44)..(44): n is a, c, g, or t
  modified_base (65)..(65): DNP phosphoramidite base
  misc_feature (65)..(65): n is a, c, g, or t
  modified_base (86)..(86): DNP phosphoramidite base
  misc_feature (86)..(86): n is a, c, g, or t
tntcttcttattaatagtactcnaggttcaaggcttgactaggnatatctccctgctggcttccntgtctgcattggcaccatttnt

SEQ ID NO: 492 - DNA, 87 bp, Artificial Sequence
  Synthetic Probe
  modified_base (2)..(2): DNP phosphoramidite base
  misc_feature (2)..(2): n is a, c, g, or t
  modified_base (23)..(23): DNP phosphoramidite base
  misc_feature (23)..(23): n is a, c, g, or t
  modified_base (44)..(44): DNP phosphoramidite base
  misc_feature (44)..(44): n is a, c, g, or t
  modified_base (65)..(65): DNP phosphoramidite base
  misc_feature (65)..(65): n is a, c, g, or t
  modified_base (86)..(86): DNP phosphoramidite base
  misc_feature (86)..(86): n is a, c, g, or t
tntttttacatttctcatgtacnagacttgagaatcagtccctntttctggaacaaaatctccgntagccagaatccctgaggcant

SEQ ID NO: 493 - DNA, 87 bp, Artificial Sequence
  Synthetic Probe
  modified_base (2)..(2): DNP phosphoramidite base
  misc_feature (2)..(2): n is a, c, g, or t
  modified_base (23)..(23): DNP phosphoramidite base
  misc_feature (23)..(23): n is a, c, g, or t
  modified_base (44)..(44): DNP phosphoramidite base
  misc_feature (44)..(44): n is a, c, g, or t
  modified_base (65)..(65): DNP phosphoramidite base
  misc_feature (65)..(65): n is a, c, g, or t
  modified_base (86)..(86): DNP phosphoramidite base
  misc_feature (86)..(86): n is a, c, g, or t
tnaatctccaatgtgaagcttcnctgcctggattcactagctgnagtctttgcacacgtttgccnttgttataggctgacattccnt

SEQ ID NO: 494 - DNA, 87 bp, Artificial Sequence
  Synthetic Probe
  modified_base (2)..(2): DNP phosphoramidite base
  misc_feature (2)..(2): n is a, c, g, or t
  modified_base (23)..(23): DNP phosphoramidite base
  misc_feature (23)..(23): n is a, c, g, or t
  modified_base (44)..(44): DNP phosphoramidite base
  misc_feature (44)..(44): n is a, c, g, or t
  modified_base (65)..(65): DNP phosphoramidite base
  misc_feature (65)..(65): n is a, c, g, or t
  modified_base (86)..(86): DNP phosphoramidite base
  misc_feature (86)..(86): n is a, c, g, or t
tnatccccattacagatgttagnccttttttaactctgacatangacacatccagtggttgcccnatgagatatgaatctgggcant

SEQ ID NO: 495 - DNA, 87 bp, Artificial Sequence
  Synthetic Probe
  modified_base (2)..(2): DNP phosphoramidite base
  misc_feature (2)..(2): n is a, c, g, or t
  modified_base (23)..(23): DNP phosphoramidite base
  misc_feature (23)..(23): n is a, c, g, or t
  modified_base (44)..(44): DNP phosphoramidite base
  misc_feature (44)..(44): n is a, c, g, or t
  modified_base (65)..(65): DNP phosphoramidite base
  misc_feature (65)..(65): n is a, c, g, or t
  modified_base (86)..(86): DNP phosphoramidite base
  misc_feature (86)..(86): n is a, c, g, or t
tntcactagcagcctccaactcncatgctctgactcccaccccnccacctacacagatgcgtgantaaacccactgccatgggagnt

SEQ ID NO: 496 - DNA, 87 bp, Artificial Sequence
  Synthetic Probe
  modified_base (2)..(2): DNP phosphoramidite base
  misc_feature (2)..(2): n is a, c, g, or t
  modified_base (23)..(23): DNP phosphoramidite base
  misc_feature (23)..(23): n is a, c, g, or t
  modified_base (44)..(44): DNP phosphoramidite base
  misc_feature (44)..(44): n is a, c, g, or t
  modified_base (65)..(65): DNP phosphoramidite base
  misc_feature (65)..(65): n is a, c, g, or t
  modified_base (86)..(86): DNP phosphoramidite base
  misc_feature (86)..(86): n is a, c, g, or t
tnaaagagccgtggttgatctcntctgggccaaatctcactganacatttacagtatccagaacntcatcctttgccacacggctnt

SEQ ID NO: 497 - DNA, 87 bp, Artificial Sequence
  Synthetic Probe
  modified_base (2)..(2): DNP phosphoramidite base
  misc_feature (2)..(2): n is a, c, g, or t
  modified_base (23)..(23): DNP phosphoramidite base
  misc_feature (23)..(23): n is a, c, g, or t
  modified_base (44)..(44): DNP phosphoramidite base
  misc_feature (44)..(44): n is a, c, g, or t
  modified_base (65)..(65): DNP phosphoramidite base
  misc_feature (65)..(65): n is a, c, g, or t
  modified_base (86)..(86): DNP phosphoramidite base
  misc_feature (86)..(86): n is a, c, g, or t
tnaaaaagaaaaaaagaggctanggataggaccaaattctatgncctcttaacacctcatctggntgcttttcacaaaactgcctnt

SEQ ID NO: 498 - DNA, 87 bp, Artificial Sequence
  Synthetic Probe
  modified_base (2)..(2): DNP phosphoramidite base
  misc_feature (2)..(2): n is a, c, g, or t
  modified_base (23)..(23): DNP phosphoramidite base
  misc_feature (23)..(23): n is a, c, g, or t
  modified_base (44)..(44): DNP phosphoramidite base
  misc_feature (44)..(44): n is a, c, g, or t
  modified_base (65)..(65): DNP phosphoramidite base
  misc_feature (65)..(65): n is a, c, g, or t
  modified_base (86)..(86): DNP phosphoramidite base
  misc_feature (86)..(86): n is a, c, g, or t
tngaatacatgtcctactgcccntaaaactctggaggatccttnttgagcatgaacattacagtngttctggaagcccagagactnt

SEQ ID NO: 499 - DNA, 87 bp, Artificial Sequence
  Synthetic Probe
  modified_base (2)..(2): DNP phosphoramidite base
  misc_feature (2)..(2): n is a, c, g, or t
  modified_base (23)..(23): DNP phosphoramidite base
  misc_feature (23)..(23): n is a, c, g, or t
  modified_base (44)..(44): DNP phosphoramidite base
  misc_feature (44)..(44): n is a, c, g, or t
  modified_base (65)..(65): DNP phosphoramidite base
  misc_feature (65)..(65): n is a, c, g, or t
  modified_base (86)..(86): DNP phosphoramidite base
  misc_feature (86)..(86): n is a, c, g, or t
tncagacctcccaggccaggcancctgacatcaaagtgaggttngctgttctatcaggttgctgntacaggttggcatatcccccnt

SEQ ID NO: 500 - DNA, 87 bp, Artificial Sequence
  Synthetic Probe
  modified_base (2)..(2): DNP phosphoramidite base
  misc_feature (2)..(2): n is a, c, g, or t
  modified_base (23)..(23): DNP phosphoramidite base
  misc_feature (23)..(23): n is a, c, g, or t
  modified_base (44)..(44): DNP phosphoramidite base
  misc_feature (44)..(44): n is a, c, g, or t
  modified_base (65)..(65): DNP phosphoramidite base
  misc_feature (65)..(65): n is a, c, g, or t
  modified_base (86)..(86): DNP phosphoramidite base
  misc_feature (86)..(86): n is a, c, g, or t
tntgcttggtttccaaattaagnctacagcttgagctaaaaatnagcttgccagtgttgagaatnctgttccctgaatttaaatgnt

SEQ ID NO: 501 - DNA, 87 bp, Artificial Sequence
  Synthetic Probe
  modified_base (2)..(2): DNP phosphoramidite base
  misc_feature (2)..(2): n is a, c, g, or t
  modified_base (23)..(23): DNP phosphoramidite base
  misc_feature (23)..(23): n is a, c, g, or t
  modified_base (44)..(44): DNP phosphoramidite base
  misc_feature (44)..(44): n is a, c, g, or t
  modified_base (65)..(65): DNP phosphoramidite base
  misc_feature (65)..(65): n is a, c, g, or t
  modified_base (86)..(86): DNP phosphoramidite base
  misc_feature (86)..(86): n is a, c, g, or t
tnacaacattcactgtgttccantggcagggttggactctgggnaaagcacacttcattttttcntctgcattcatttctgctttnt

SEQ ID NO: 502 - DNA, 87 bp, Artificial Sequence
  Synthetic Probe
  modified_base (2)..(2): DNP phosphoramidite base
  misc_feature (2)..(2): n is a, c, g, or t
  modified_base (23)..(23): DNP phosphoramidite base
  misc_feature (23)..(23): n is a, c, g, or t
  modified_base (44)..(44): DNP phosphoramidite base
  misc_feature (44)..(44): n is a, c, g, or t
  modified_base (65)..(65): DNP phosphoramidite base
  misc_feature (65)..(65): n is a, c, g, or t
  modified_base (86)..(86): DNP phosphoramidite base
  misc_feature (86)..(86): n is a, c, g, or t
tnggctttctaactggtggtaanagaccagaagatgaaaataangagatgtaagttgcaggctcnaatatggggaaaaggttgtant

SEQ ID NO: 503 - DNA, 87 bp, Artificial Sequence
  Synthetic Probe
  modified_base (2)..(2): DNP phosphoramidite base
  misc_feature (2)..(2): n is a, c, g, or t
  modified_base (23)..(23): DNP phosphoramidite base
  misc_feature (23)..(23): n is a, c, g, or t
  modified_base (44)..(44): DNP phosphoramidite base
  misc_feature (44)..(44): n is a, c, g, or t
  modified_base (65)..(65): DNP phosphoramidite base
  misc_feature (65)..(65): n is a, c, g, or t
  modified_base (86)..(86): DNP phosphoramidite base
  misc_feature (86)..(86): n is a, c, g, or t
tnctgaaatctcactttcccatnggataaccacaaagtttgatngcttatccttcctgatccctncaacccctacctggtagtcant

SEQ ID NO: 504 - DNA, 87 bp, Artificial Sequence
  Synthetic Probe
  modified_base (2)..(2): DNP phosphoramidite base
  misc_feature (2)..(2): n is a, c, g, or t
  modified_base (23)..(23): DNP phosphoramidite base
  misc_feature (23)..(23): n is a, c, g, or t
  modified_base (44)..(44): DNP phosphoramidite base
  misc_feature (44)..(44): n is a, c, g, or t
  modified_base (65)..(65): DNP phosphoramidite base
  misc_feature (65)..(65): n is a, c, g, or t
  modified_base (86)..(86): DNP phosphoramidite base
  misc_feature (86)..(86): n is a, c, g, or t
tnttgtttaagacacagaagcangcccatggaaaagcatggtgnggaagttgcctttagtcatcnctgacttaggttgcaccttcnt

SEQ ID NO: 505 - DNA, 87 bp, Artificial Sequence
  Synthetic Probe
  modified_base (2)..(2): DNP phosphoramidite base
  misc_feature (2)..(2): n is a, c, g, or t
  modified_base (23)..(23): DNP phosphoramidite base
  misc_feature (23)..(23): n is a, c, g, or t
  modified_base (44)..(44): DNP phosphoramidite base
  misc_feature (44)..(44): n is a, c, g, or t
  modified_base (65)..(65): DNP phosphoramidite base
  misc_feature (65)..(65): n is a, c, g, or t
  modified_base (86)..(86): DNP phosphoramidite base
  misc_feature (86)..(86): n is a, c, g, or t
tncactgtctttgttatctttanttgcataatatctgaaccgtngcttccatgccaaggctctgntcaagttataatctagattgnt

SEQ ID NO: 506 - DNA, 87 bp, Artificial Sequence
  Synthetic Probe
  modified_base (2)..(2): DNP phosphoramidite base
  misc_feature (2)..(2): n is a, c, g, or t
  modified_base (23)..(23): DNP phosphoramidite base
  misc_feature (23)..(23): n is a, c, g, or t
  modified_base (44)..(44): DNP phosphoramidite base
  misc_feature (44)..(44): n is a, c, g, or t
  modified_base (65)..(65): DNP phosphoramidite base
  misc_feature (65)..(65): n is a, c, g, or t
  modified_base (86)..(86): DNP phosphoramidite base
  misc_feature (86)..(86): n is a, c, g, or t
tntgcattaggaggcttaagagnagcagagagaacattctgtgnaactgctccccaaccccaggnataagactgtgcattgttctnt

SEQ ID NO: 507 - DNA, 87 bp, Artificial Sequence
  Synthetic Probe
  modified_base (2)..(2): DNP phosphoramidite base
  misc_feature (2)..(2): n is a, c, g, or t
  modified_base (23)..(23): DNP phosphoramidite base
  misc_feature (23)..(23): n is a, c, g, or t
  modified_base (44)..(44): DNP phosphoramidite base
  misc_feature (44)..(44): n is a, c, g, or t
  modified_base (65)..(65): DNP phosphoramidite base
  misc_feature (65)..(65): n is a, c, g, or t
  modified_base (86)..(86): DNP phosphoramidite base
  misc_feature (86)..(86): n is a, c, g, or t
tnaaacctccagtgaaagcaggnccacagctggagagagtgttntatagtgcaaggcaggaagtnatggagtcaatgacttctgcnt

SEQ ID NO: 508 - DNA, 87 bp, Artificial Sequence
  Synthetic Probe
  modified_base (2)..(2): DNP phosphoramidite base
  misc_feature (2)..(2): n is a, c, g, or t
  modified_base (23)..(23): DNP phosphoramidite base
  misc_feature (23)..(23): n is a, c, g, or t
  modified_base (44)..(44): DNP phosphoramidite base
  misc_feature (44)..(44): n is a, c, g, or t
  modified_base (65)..(65): DNP phosphoramidite base
  misc_feature (65)..(65): n is a, c, g, or t
  modified_base (86)..(86): DNP phosphoramidite base
  misc_feature (86)..(86): n is a, c, g, or t
tnagaaaactcccattgctacangaaaggatgaaaaaggtgctngagtgcagacagagtgaagcncaaagttgggagatgcaggcnt

SEQ ID NO: 509 - DNA, 87 bp, Artificial Sequence
  Synthetic Probe
  modified_base (2)..(2): DNP phosphoramidite base
  misc_feature (2)..(2): n is a, c, g, or t
  modified_base (23)..(23): DNP phosphoramidite base
  misc_feature (23)..(23): n is a, c, g, or t
  modified_base (44)..(44): DNP phosphoramidite base
  misc_feature (44)..(44): n is a, c, g, or t
  modified_base (65)..(65): DNP phosphoramidite base
  misc_feature (65)..(65): n is a, c, g, or t
  modified_base (86)..(86): DNP phosphoramidite base
  misc_feature (86)..(86): n is a, c, g, or t
tngttgtgcccagaatacagttnggaacttccagcatttgaatnggagcaacacaaaagtagganattgagatgcttagacatccnt

SEQ ID NO: 510 - DNA, 87 bp, Artificial Sequence
  Synthetic Probe
  modified_base (2)..(2): DNP phosphoramidite base
  misc_feature (2)..(2): n is a, c, g, or t
  modified_base (23)..(23): DNP phosphoramidite base
  misc_feature (23)..(23): n is a, c, g, or t
  modified_base (44)..(44): DNP phosphoramidite base
  misc_feature (44)..(44): n is a, c, g, or t
  modified_base (65)..(65): DNP phosphoramidite base
  misc_feature (65)..(65): n is a, c, g, or t
  modified_base (86)..(86): DNP phosphoramidite base
  misc_feature (86)..(86): n is a, c, g, or t
tntatgactttgaaagagcacangtctgcagaatagccaggtgnattcatacccacagtaaatgnttgggaagaactgttgtacant

SEQ ID NO: 511 - DNA, 87 bp, Artificial Sequence
  Synthetic Probe
  modified_base (2)..(2): DNP phosphoramidite base
  misc_feature (2)..(2): n is a, c, g, or t
  modified_base (23)..(23): DNP phosphoramidite base
  misc_feature (23)..(23): n is a, c, g, or t
  modified_base (44)..(44): DNP phosphoramidite base
  misc_feature (44)..(44): n is a, c, g, or t
  modified_base (65)..(65): DNP phosphoramidite base
  misc_feature (65)..(65): n is a, c, g, or t
  modified_base (86)..(86): DNP phosphoramidite base
  misc_feature (86)..(86): n is a, c, g, or t
tntactgctccactccctgctcnttacagaatccactttcaaanaaacgcaaacgtggtattatncaatcccacttaacgggacant

SEQ ID NO: 512 - DNA, 87 bp, Artificial Sequence
  Synthetic Probe
  modified_base (2)..(2): DNP phosphoramidite base
  misc_feature (2)..(2): n is a, c, g, or t
  modified_base (23)..(23): DNP phosphoramidite base
  misc_feature (23)..(23): n is a, c, g, or t
  modified_base (44)..(44): DNP phosphoramidite base
  misc_feature (44)..(44): n is a, c, g, or t
  modified_base (65)..(65): DNP phosphoramidite base
  misc_feature (65)..(65): n is a, c, g, or t
  modified_base (86)..(86): DNP phosphoramidite base
  misc_feature (86)..(86): n is a, c, g, or t
tntctctacaaggaactgaggancaggggtttggcctttccagnatctttccaggcagaatcaanaggcttctcgcagcacttgtnt

SEQ ID NO: 513 - DNA, 87 bp, Artificial Sequence
  Synthetic Probe
  modified_base (2)..(2): DNP phosphoramidite base
  misc_feature (2)..(2): n is a, c, g, or t
  modified_base (23)..(23): DNP phosphoramidite base
  misc_feature (23)..(23): n is a, c, g, or t
  modified_base (44)..(44): DNP phosphoramidite base
  misc_feature (44)..(44): n is a, c, g, or t
  modified_base (65)..(65): DNP phosphoramidite base
  misc_feature (65)..(65): n is a, c, g, or t
  modified_base (86)..(86): DNP phosphoramidite base
  misc_feature (86)..(86): n is a, c, g, or t
tnttttaaacaaatccagtcatntaaaagcggagctgcagagancaagagtagggagctcttttnctgtactgtgaagtttggttnt

SEQ ID NO: 514 - DNA, 87 bp, Artificial Sequence
  Synthetic Probe
  modified_base (2)..(2): DNP phosphoramidite base
  misc_feature (2)..(2): n is a, c, g, or t
  modified_base (23)..(23): DNP phosphoramidite base
  misc_feature (23)..(23): n is a, c, g, or t
  modified_base (44)..(44): DNP phosphoramidite base
  misc_feature (44)..(44): n is a, c, g, or t
  modified_base (65)..(65): DNP phosphoramidite base
  misc_feature (65)..(65): n is a, c, g, or t
  modified_base (86)..(86): DNP phosphoramidite base
  misc_feature (86)..(86): n is a, c, g, or t
tnaaataagtatgttgttctttncttgtaggcttgcctttagantgtgtctggtcactaccttgngaaacccttacaaatggcaant

SEQ ID NO: 515 - DNA, 87 bp, Artificial Sequence
  Synthetic Probe
  modified_base (2)..(2): DNP phosphoramidite base
  misc_feature (2)..(2): n is a, c, g, or t
  modified_base (23)..(23): DNP phosphoramidite base
  misc_feature (23)..(23): n is a, c, g, or t
  modified_base (44)..(44): DNP phosphoramidite base
  misc_feature (44)..(44): n is a, c, g, or t
  modified_base (65)..(65): DNP phosphoramidite base
  misc_feature (65)..(65): n is a, c, g, or t
  modified_base (86)..(86): DNP phosphoramidite base
  misc_feature (86)..(86): n is a, c, g, or t
tnaaaacactgctgagggcacancggtgcatgcattatagatgnattctgaggactgaggcttgntgccagcactaagtggctttnt

SEQ ID NO: 516 - DNA, 87 bp, Artificial Sequence
  Synthetic Probe
  modified_base (2)..(2): DNP phosphoramidite base
  misc_feature (2)..(2): n is a, c, g, or t
  modified_base (23)..(23): DNP phosphoramidite base
  misc_feature (23)..(23): n is a, c, g, or t
  modified_base (44)..(44): DNP phosphoramidite base
  misc_feature (44)..(44): n is a, c, g, or t
  modified_base (65)..(65): DNP phosphoramidite base
  misc_feature (65)..(65): n is a, c, g, or t
  modified_base (86)..(86): DNP phosphoramidite base
  misc_feature (86)..(86): n is a, c, g, or t
tntgatatgttgtgtcggacctncaaggggggtgatggtttgangctctggtcagaggctctcangtagctgtgcatatctatagnt

SEQ ID NO: 517 - DNA, 87 bp, Artificial Sequence
  Synthetic Probe
  modified_base (2)..(2): DNP phosphoramidite base
  misc_feature (2)..(2): n is a, c, g, or t
  modified_base (23)..(23): DNP phosphoramidite base
  misc_feature (23)..(23): n is a, c, g, or t
  modified_base (44)..(44): DNP phosphoramidite base
  misc_feature (44)..(44): n is a, c, g, or t
  modified_base (65)..(65): DNP phosphoramidite base
  misc_feature (65)..(65): n is a, c, g, or t
  modified_base (86)..(86): DNP phosphoramidite base
  misc_feature (86)..(86): n is a, c, g, or t
tnaacataaactctgcagaaacnaaaggctgtgaatttaggtcnacttggactctgaggccatcnagataaaatatattagtactnt

SEQ ID NO: 518 - DNA, 87 bp, Artificial Sequence
  Synthetic Probe
  modified_base (2)..(2): DNP phosphoramidite base
  misc_feature (2)..(2): n is a, c, g, or t
  modified_base (23)..(23): DNP phosphoramidite base
  misc_feature (23)..(23): n is a, c, g, or t
  modified_base (44)..(44): DNP phosphoramidite base
  misc_feature (44)..(44): n is a, c, g, or t
  modified_base (65)..(65): DNP phosphoramidite base
  misc_feature (65)..(65): n is a, c, g, or t
  modified_base (86)..(86): DNP phosphoramidite base
  misc_feature (86)..(86): n is a, c, g, or t
tntttaggaggaagaccgaggantagcaggcgcaaccattccanttcaagtagctgtggcattcnctcatttaactggttgaccant

SEQ ID NO: 519 - DNA, 87 bp, Artificial Sequence
  Synthetic Probe
  modified_base (2)..(2): DNP phosphoramidite base
  misc_feature (2)..(2): n is a, c, g, or t
  modified_base (23)..(23): DNP phosphoramidite base
  misc_feature (23)..(23): n is a, c, g, or t
  modified_base (44)..(44): DNP phosphoramidite base
  misc_feature (44)..(44): n is a, c, g, or t
  modified_base (65)..(65): DNP phosphoramidite base
  misc_feature (65)..(65): n is a, c, g, or t
  modified_base (86)..(86): DNP phosphoramidite base
  misc_feature (86)..(86): n is a, c, g, or t
tnactgcacagtgatggagaggncccgaagctccttccaggctncaccatttcaacttcatcacnacatgggacagtccctgatgnt

SEQ ID NO: 520 - DNA, 87 bp, Artificial Sequence
  Synthetic Probe
  modified_base (2)..(2): DNP phosphoramidite base
  misc_feature (2)..(2): n is a, c, g, or t
  modified_base (23)..(23): DNP phosphoramidite base
  misc_feature (23)..(23): n is a, c, g, or t
  modified_base (44)..(44): DNP phosphoramidite base
  misc_feature (44)..(44): n is a, c, g, or t
  modified_base (65)..(65): DNP phosphoramidite base
  misc_feature (65)..(65): n is a, c, g, or t
  modified_base (86)..(86): DNP phosphoramidite base
  misc_feature (86)..(86): n is a, c, g, or t
tntgcctagccctgagatcagtnatttgtctagaaccaactagnttggagtaaggacaggagctngttcttcaggagaggagggant

SEQ ID NO: 521 - DNA, 87 bp, Artificial Sequence
  Synthetic Probe
  modified_base (2)..(2): DNP phosphoramidite base
  misc_feature (2)..(2): n is a, c, g, or t
  modified_base (23)..(23): DNP phosphoramidite base
  misc_feature (23)..(23): n is a, c, g, or t
  modified_base (44)..(44): DNP phosphoramidite base
  misc_feature (44)..(44): n is a, c, g, or t
  modified_base (65)..(65): DNP phosphoramidite base
  misc_feature (65)..(65): n is a, c, g, or t
  modified_base (86)..(86): DNP phosphoramidite base
  misc_feature (86)..(86): n is a, c, g, or t
tnagtgctgggcagacagtaacngggtgacctccacaaagctcnagactcctgaattggaccagnccagcctccttgaactgcccnt

SEQ ID NO: 522 - DNA, 87 bp, Artificial Sequence
  Synthetic Probe
  modified_base (2)..(2): DNP phosphoramidite base
  misc_feature (2)..(2): n is a, c, g, or t
  modified_base (23)..(23): DNP phosphoramidite base
  misc_feature (23)..(23): n is a, c, g, or t
  modified_base (44)..(44): DNP phosphoramidite base
  misc_feature (44)..(44): n is a, c, g, or t
  modified_base (65)..(65): DNP phosphoramidite base
  misc_feature (65)..(65): n is a, c, g, or t
  modified_base (86)..(86): DNP phosphoramidite base
  misc_feature (86)..(86): n is a, c, g, or t
tnaaaaatgccttccctactcancagtcctctcaaatggattangtactggcatttgaggggttnttgagggatgggaaaagagant

SEQ ID NO: 523 - DNA, 87 bp, Artificial Sequence
  Synthetic Probe
  modified_base (2)..(2): DNP phosphoramidite base
  misc_feature (2)..(2): n is a, c, g, or t
  modified_base (23)..(23): DNP phosphoramidite base
  misc_feature (23)..(23): n is a, c, g, or t
  modified_base (44)..(44): DNP phosphoramidite base
  misc_feature (44)..(44): n is a, c, g, or t
  modified_base (65)..(65): DNP phosphoramidite base
  misc_feature (65)..(65): n is a, c, g, or t
  modified_base (86)..(86): DNP phosphoramidite base
  misc_feature (86)..(86): n is a, c, g, or t
tntccacccctccttgcctgttngtttttagagcactgagcaanatgcaaagccgacaccaaaangagccccagaaattttttccnt

SEQ ID NO: 524 - DNA, 87 bp, Artificial Sequence
  Synthetic Probe
  modified_base (2)..(2): DNP phosphoramidite base
  misc_feature (2)..(2): n is a, c, g, or t
  modified_base (23)..(23): DNP phosphoramidite base
  misc_feature (23)..(23): n is a, c, g, or t
  modified_base (44)..(44): DNP phosphoramidite base
  misc_feature (44)..(44): n is a, c, g, or t
  modified_base (65)..(65): DNP phosphoramidite base
  misc_feature (65)..(65): n is a, c, g, or t
  modified_base (86)..(86): DNP phosphoramidite base
  misc_feature (86)..(86): n is a, c, g, or t
tnacccagttgtcttggtagganaagagctggatggaagaaggngaggaaatggaaaggcccccntgcaggcatgggaaactgggnt

SEQ ID NO: 525 - DNA, 87 bp, Artificial Sequence
  Synthetic Probe
  modified_base (2)..(2): DNP phosphoramidite base
  misc_feature (2)..(2): n is a, c, g, or t
  modified_base (23)..(23): DNP phosphoramidite base
  misc_feature (23)..(23): n is a, c, g, or t
  modified_base (44)..(44): DNP phosphoramidite base
  misc_feature (44)..(44): n is a, c, g, or t
  modified_base (65)..(65): DNP phosphoramidite base
  misc_feature (65)..(65): n is a, c, g, or t
  modified_base (86)..(86): DNP phosphoramidite base
  misc_feature (86)..(86): n is a, c, g, or t
tnttagctcttaatgctcagcangaaaccagtatagagggcctntcaaatttttgcttaggaggnaatgcaagggctgtagtatcnt

SEQ ID NO: 526 - DNA, 87 bp, Artificial Sequence
  Synthetic Probe
  modified_base (2)..(2): DNP phosphoramidite base
  misc_feature (2)..(2): n is a, c, g, or t
  modified_base (23)..(23): DNP phosphoramidite base
  misc_feature (23)..(23): n is a, c, g, or t
  modified_base (44)..(44): DNP phosphoramidite base
  misc_feature (44)..(44): n is a, c, g, or t
  modified_base (65)..(65): DNP phosphoramidite base
  misc_feature (65)..(65): n is a, c, g, or t
  modified_base (86)..(86): DNP phosphoramidite base
  misc_feature (86)..(86): n is a, c, g, or t
tntgttcctcagtaagagtgctnttagacaacaaagggacaggncgaaggccaagtgtcacctantgggagagtggcagtggttant

SEQ ID NO: 527 - DNA, 87 bp, Artificial Sequence
  Synthetic Probe
  modified_base (2)..(2): DNP phosphoramidite base
  misc_feature (2)..(2): n is a, c, g, or t
  modified_base (23)..(23): DNP phosphoramidite base
  misc_feature (23)..(23): n is a, c, g, or t
  modified_base (44)..(44): DNP phosphoramidite base
  misc_feature (44)..(44): n is a, c, g, or t
  modified_base (65)..(65): DNP phosphoramidite base
  misc_feature (65)..(65): n is a, c, g, or t
  modified_base (86)..(86): DNP phosphoramidite base
  misc_feature (86)..(86): n is a, c, g, or t
tnatcctaattcatcctaattcntctgaccccaaatttagtttnggtcccacgcttgggtaggtntgtactctcttttttggttgnt

SEQ ID NO: 528 - DNA, 87 bp, Artificial Sequence
  Synthetic Probe
  modified_base (2)..(2): DNP phosphoramidite base
  misc_feature (2)..(2): n is a, c, g, or t
  modified_base (23)..(23): DNP phosphoramidite base
  misc_feature (23)..(23): n is a, c, g, or t
  modified_base (44)..(44): DNP phosphoramidite base
  misc_feature (44)..(44): n is a, c, g, or t
  modified_base (65)..(65): DNP phosphoramidite base
  misc_feature (65)..(65): n is a, c, g, or t
  modified_base (86)..(86): DNP phosphoramidite base
  misc_feature (86)..(86): n is a, c, g, or t
tngcactggacataggagctcanaaccccaggagtgacttaagngagcacaggaaatgggagtanagtaagtcagtacagagaacnt

SEQ ID NO: 529 - DNA, 87 bp, Artificial Sequence
  Synthetic Probe
  modified_base (2)..(2): DNP phosphoramidite base
  misc_feature (2)..(2): n is a, c, g, or t
  modified_base (23)..(23): DNP phosphoramidite base
  misc_feature (23)..(23): n is a, c, g, or t
  modified_base (44)..(44): DNP phosphoramidite base
  misc_feature (44)..(44): n is a, c, g, or t
  modified_base (65)..(65): DNP phosphoramidite base
  misc_feature (65)..(65): n is a, c, g, or t
  modified_base (86)..(86): DNP phosphoramidite base
  misc_feature (86)..(86): n is a, c, g, or t
tntctgctgctgatgcccagctnctcttaaggcctcttaagganactctcagaagtgctacaagncccatcagacctgggctcacnt

SEQ ID NO: 530 - DNA, 87 bp, Artificial Sequence
  Synthetic Probe
  modified_base (2)..(2): DNP phosphoramidite base
  misc_feature (2)..(2): n is a, c, g, or t
  modified_base (23)..(23): DNP phosphoramidite base
  misc_feature (23)..(23): n is a, c, g, or t
  modified_base (44)..(44): DNP phosphoramidite base
  misc_feature (44)..(44): n is a, c, g, or t
  modified_base (65)..(65): DNP phosphoramidite base
  misc_feature (65)..(65): n is a, c, g, or t
  modified_base (86)..(86): DNP phosphoramidite base
  misc_feature (86)..(86): n is a, c, g, or t
tnttgaaggaggcaaagtgtagncttcctcctgttgattctgcnttttgaattgttgtataaganctgctcttccccaaagtgctnt

SEQ ID NO: 531 - DNA, 87 bp, Artificial Sequence
  Synthetic Probe
  modified_base (2)..(2): DNP phosphoramidite base
  misc_feature (2)..(2): n is a, c, g, or t
  modified_base (23)..(23): DNP phosphoramidite base
  misc_feature (23)..(23): n is a, c, g, or t
  modified_base (44)..(44): DNP phosphoramidite base
  misc_feature (44)..(44): n is a, c, g, or t
  modified_base (65)..(65): DNP phosphoramidite base
  misc_feature (65)..(65): n is a, c, g, or t
  modified_base (86)..(86): DNP phosphoramidite base
  misc_feature (86)..(86): n is a, c, g, or t
tngttcctaacaccattcaactncttaccatagatatttgcctnctcctctttaccatttccagngcaatgcctgctgagataggnt

SEQ ID NO: 532 - DNA, 87 bp, Artificial Sequence
  Synthetic Probe
  modified_base (2)..(2): DNP phosphoramidite base
  misc_feature (2)..(2): n is a, c, g, or t
  modified_base (23)..(23): DNP phosphoramidite base
  misc_feature (23)..(23): n is a, c, g, or t
  modified_base (44)..(44): DNP phosphoramidite base
  misc_feature (44)..(44): n is a, c, g, or t
  modified_base (65)..(65): DNP phosphoramidite base
  misc_feature (65)..(65): n is a, c, g, or t
  modified_base (86)..(86): DNP phosphoramidite base
  misc_feature (86)..(86): n is a, c, g, or t
tnagattcagtgtgagcatttanatgtgaggattcagattttcntttttctcccacactcctgtngagtcagacacatccataatnt

SEQ ID NO: 533 - DNA, 87 bp, Artificial Sequence
  Synthetic Probe
  modified_base (2)..(2): DNP phosphoramidite base
  misc_feature (2)..(2): n is a, c, g, or t
  modified_base (23)..(23): DNP phosphoramidite base
  misc_feature (23)..(23): n is a, c, g, or t
  modified_base (44)..(44): DNP phosphoramidite base
  misc_feature (44)..(44): n is a, c, g, or t
  modified_base (65)..(65): DNP phosphoramidite base
  misc_feature (65)..(65): n is a, c, g, or t
  modified_base (86)..(86): DNP phosphoramidite base
  misc_feature (86)..(86): n is a, c, g, or t
tnccattaaaatataaaaagtcntgattgcctgcagatgtgccnaacctgagaccagaccgccancaaagacttactgatacttgnt

SEQ ID NO: 534 - DNA, 87 bp, Artificial Sequence
  Synthetic Probe
  modified_base (2)..(2): DNP phosphoramidite base
  misc_feature (2)..(2): n is a, c, g, or t
  modified_base (23)..(23): DNP phosphoramidite base
  misc_feature (23)..(23): n is a, c, g, or t
  modified_base (44)..(44): DNP phosphoramidite base
  misc_feature (44)..(44): n is a, c, g, or t
  modified_base (65)..(65): DNP phosphoramidite base
  misc_feature (65)..(65): n is a, c, g, or t
  modified_base (86)..(86): DNP phosphoramidite base
  misc_feature (86)..(86): n is a, c, g, or t
tnacacagctcaaatgtggacangcaccctggaagatactcttnagccagccatggaggtgaccnatgtaatgtggtcccactgtnt

SEQ ID NO: 535 - DNA, 87 bp, Artificial Sequence
  Synthetic Probe
  modified_base (2)..(2): DNP phosphoramidite base
  misc_feature (2)..(2): n is a, c, g, or t
  modified_base (23)..(23): DNP phosphoramidite base
  misc_feature (23)..(23): n is a, c, g, or t
  modified_base (44)..(44): DNP phosphoramidite base
  misc_feature (44)..(44): n is a, c, g, or t
  modified_base (65)..(65): DNP phosphoramidite base
  misc_feature (65)..(65): n is a, c, g, or t
  modified_base (86)..(86): DNP phosphoramidite base
  misc_feature (86)..(86): n is a, c, g, or t
tnaattcaactcagagcctgagnaaattcagctcagttccaggncagctggagcataccagagtnaaggggaccaagtcccaggcnt

SEQ ID NO: 536 - DNA, 87 bp, Artificial Sequence
  Synthetic Probe
  modified_base (2)..(2): DNP phosphoramidite base
  misc_feature (2)..(2): n is a, c, g, or t
  modified_base (23)..(23): DNP phosphoramidite base
  misc_feature (23)..(23): n is a, c, g, or t
  modified_base (44)..(44): DNP phosphoramidite base
  misc_feature (44)..(44): n is a, c, g, or t
  modified_base (65)..(65): DNP phosphoramidite base
  misc_feature (65)..(65): n is a, c, g, or t
  modified_base (86)..(86): DNP phosphoramidite base
  misc_feature (86)..(86): n is a, c, g, or t
tncccaactctactttggttttngagcagttttcctgacatagnatggaaaaagaacaagcaggncccatccacgtactagagaant

SEQ ID NO: 537 - DNA, 87 bp, Artificial Sequence
  Synthetic Probe
  modified_base (2)..(2): DNP phosphoramidite base
  misc_feature (2)..(2): n is a, c, g, or t
  modified_base (23)..(23): DNP phosphoramidite base
  misc_feature (23)..(23): n is a, c, g, or t
  modified_base (44)..(44): DNP phosphoramidite base
  misc_feature (44)..(44): n is a, c, g, or t
  modified_base (65)..(65): DNP phosphoramidite base
  misc_feature (65)..(65): n is a, c, g, or t
  modified_base (86)..(86): DNP phosphoramidite base
  misc_feature (86)..(86): n is a, c, g, or t
tngacatacaaacaaagagattnctgaaggattccacatgatantcccttctgaaaggttcttgnagtaacacttgagagtaacant

SEQ ID NO: 538 - DNA, 87 bp, Artificial Sequence
  Synthetic Probe
  modified_base (2)..(2): DNP phosphoramidite base
  misc_feature (2)..(2): n is a, c, g, or t
  modified_base (23)..(23): DNP phosphoramidite base
  misc_feature (23)..(23): n is a, c, g, or t
  modified_base (44)..(44): DNP phosphoramidite base
  misc_feature (44)..(44): n is a, c, g, or t
  modified_base (65)..(65): DNP phosphoramidite base
  misc_feature (65)..(65): n is a, c, g, or t
  modified_base (86)..(86): DNP phosphoramidite base
  misc_feature (86)..(86): n is a, c, g, or t
tnaaagtctgacagttgatatcncaaggtgagtgatcctagagntatcataacatgattctctanggttatatgaggtaaggggant

SEQ ID NO: 539 - DNA, 87 bp, Artificial Sequence
  Synthetic Probe
  modified_base (2)..(2): DNP phosphoramidite base
  misc_feature (2)..(2): n is a, c, g, or t
  modified_base (23)..(23): DNP phosphoramidite base
  misc_feature (23)..(23): n is a, c, g, or t
  modified_base (44)..(44): DNP phosphoramidite base
  misc_feature (44)..(44): n is a, c, g, or t
  modified_base (65)..(65): DNP phosphoramidite base
  misc_feature (65)..(65): n is a, c, g, or t
  modified_base (86)..(86): DNP phosphoramidite base
  misc_feature (86)..(86): n is a, c, g, or t
tncactttcacattaatgggagnaactgttatagcccttgagtngaaagcatggcttatttcacnctagtttccctggtgccaggnt

SEQ ID NO: 540 - DNA, 87 bp, Artificial Sequence
  Synthetic Probe
  modified_base (2)..(2): DNP phosphoramidite base
  misc_feature (2)..(2): n is a, c, g, or t
  modified_base (23)..(23): DNP phosphoramidite base
  misc_feature (23)..(23): n is a, c, g, or t
  modified_base (44)..(44): DNP phosphoramidite base
  misc_feature (44)..(44): n is a, c, g, or t
  modified_base (65)..(65): DNP phosphoramidite base
  misc_feature (65)..(65): n is a, c, g, or t
  modified_base (86)..(86): DNP phosphoramidite base
  misc_feature (86)..(86): n is a, c, g, or t
tntgcttgtaaattattctgctntcttttttcatccagtcttangagccccccaaaatgcactcnttggatctggtgcactgttgnt

SEQ ID NO: 541 - DNA, 87 bp, Artificial Sequence
  Synthetic Probe
  modified_base (2)..(2): DNP phosphoramidite base
  misc_feature (2)..(2): n is a, c, g, or t
  modified_base (23)..(23): DNP phosphoramidite base
  misc_feature (23)..(23): n is a, c, g, or t
  modified_base (44)..(44): DNP phosphoramidite base
  misc_feature (44)..(44): n is a, c, g, or t
  modified_base (65)..(65): DNP phosphoramidite base
  misc_feature (65)..(65): n is a, c, g, or t
  modified_base (86)..(86): DNP phosphoramidite base
  misc_feature (86)..(86): n is a, c, g, or t
tnccaaagaagccatccttagcnaagaaccttggactcaggagnagtattgctcctcgagctgtngtaacagccttacaacatggnt

SEQ ID NO: 542 - DNA, 87 bp, Artificial Sequence
  Synthetic Probe
  modified_base (2)..(2): DNP phosphoramidite base
  misc_feature (2)..(2): n is a, c, g, or t
  modified_base (23)..(23): DNP phosphoramidite base
  misc_feature (23)..(23): n is a, c, g, or t
  modified_base (44)..(44): DNP phosphoramidite base
  misc_feature (44)..(44): n is a, c, g, or t
  modified_base (65)..(65): DNP phosphoramidite base
  misc_feature (65)..(65): n is a, c, g, or t
  modified_base (86)..(86): DNP phosphoramidite base
  misc_feature (86)..(86): n is a, c, g, or t
tnccccaagtgacacagtgtcanctttacagcaccagttgattnaaatgttggcattgctaactncacatggtgattttccccaant

SEQ ID NO: 543 - DNA, 87 bp, Artificial Sequence
  Synthetic Probe
  modified_base (2)..(2): DNP phosphoramidite base
  misc_feature (2)..(2): n is a, c, g, or t
  modified_base (23)..(23): DNP phosphoramidite base
  misc_feature (23)..(23): n is a, c, g, or t
  modified_base (44)..(44): DNP phosphoramidite base
  misc_feature (44)..(44): n is a, c, g, or t
  modified_base (65)..(65): DNP phosphoramidite base
  misc_feature (65)..(65): n is a, c, g, or t
  modified_base (86)..(86): DNP phosphoramidite base
  misc_feature (86)..(86): n is a, c, g, or t
tnttatctcagtagtgcttggantgagtgttatacatttggaancttcagtacgcaaaggatggntgcttacaatgactcctcatnt

SEQ ID NO: 544 - DNA, 87 bp, Artificial Sequence
  Synthetic Probe
  modified_base (2)..(2): DNP phosphoramidite base
  misc_feature (2)..(2): n is a, c, g, or t
  modified_base (23)..(23): DNP phosphoramidite base
  misc_feature (23)..(23): n is a, c, g, or t
  modified_base (44)..(44): DNP phosphoramidite base
  misc_feature (44)..(44): n is a, c, g, or t
  modified_base (65)..(65): DNP phosphoramidite base
  misc_feature (65)..(65): n is a, c, g, or t
  modified_base (86)..(86): DNP phosphoramidite base
  misc_feature (86)..(86): n is a, c, g, or t
tnttacaagaatggacgaccagncgacccaatgtggcaaagccnaattgttgcacctggggccancagaagaaattcttgatgctnt

SEQ ID NO: 545 - DNA, 87 bp, Artificial Sequence
  Synthetic Probe
  modified_base (2)..(2): DNP phosphoramidite base
  misc_feature (2)..(2): n is a, c, g, or t
  modified_base (23)..(23): DNP phosphoramidite base
  misc_feature (23)..(23): n is a, c, g, or t
  modified_base (44)..(44): DNP phosphoramidite base
  misc_feature (44)..(44): n is a, c, g, or t
  modified_base (65)..(65): DNP phosphoramidite base
  misc_feature (65)..(65): n is a, c, g, or t
  modified_base (86)..(86): DNP phosphoramidite base
  misc_feature (86)..(86): n is a, c, g, or t
tntgttaagtcaaaggaaataancgtcattaatatggaggatgncccatccaccgacatagttcnttttagaaggctgaataggtnt

SEQ ID NO: 546 - DNA, 87 bp, Artificial Sequence
  Synthetic Probe
  modified_base (2)..(2): DNP phosphoramidite base
  misc_feature (2)..(2): n is a, c, g, or t
  modified_base (23)..(23): DNP phosphoramidite base
  misc_feature (23)..(23): n is a, c, g, or t
  modified_base (44)..(44): DNP phosphoramidite base
  misc_feature (44)..(44): n is a, c, g, or t
  modified_base (65)..(65): DNP phosphoramidite base
  misc_feature (65)..(65): n is a, c, g, or t
  modified_base (86)..(86): DNP phosphoramidite base
  misc_feature (86)..(86): n is a, c, g, or t
tngaaattcatttcaatggcttnattattaaatgaagccgtggnttccaatgggacatcaagagnattccaagccaacctgatatnt

SEQ ID NO: 547 - DNA, 87 bp, Artificial Sequence
  Synthetic Probe
  modified_base (2)..(2): DNP phosphoramidite base
  misc_feature (2)..(2): n is a, c, g, or t
  modified_base (23)..(23): DNP phosphoramidite base
  misc_feature (23)..(23): n is a, c, g, or t
  modified_base (44)..(44): DNP phosphoramidite base
  misc_feature (44)..(44): n is a, c, g, or t
  modified_base (65)..(65): DNP phosphoramidite base
  misc_feature (65)..(65): n is a, c, g, or t
  modified_base (86)..(86): DNP phosphoramidite base
  misc_feature (86)..(86): n is a, c, g, or t
tnagcaaaacctgactttaagcnaaaatcatctgagtgtcactntccatcttctttgtgctgtcnagatttacaattctcctgcant

SEQ ID NO: 548 - DNA, 87 bp, Artificial Sequence
  Synthetic Probe
  modified_base (2)..(2): DNP phosphoramidite base
  misc_feature (2)..(2): n is a, c, g, or t
  modified_base (23)..(23): DNP phosphoramidite base
  misc_feature (23)..(23): n is a, c, g, or t
  modified_base (44)..(44): DNP phosphoramidite base
  misc_feature (44)..(44): n is a, c, g, or t
  modified_base (65)..(65): DNP phosphoramidite base
  misc_feature (65)..(65): n is a, c, g, or t
  modified_base (86)..(86): DNP phosphoramidite base
  misc_feature (86)..(86): n is a, c, g, or t
tnattttggggatttgatatgcnagctacagtgacagctataantaatggggacaacagttaacnatagggtacttatgcacgctnt

SEQ ID NO: 549 - DNA, 87 bp, Artificial Sequence
  Synthetic Probe
  modified_base (2)..(2): DNP phosphoramidite base
  misc_feature (2)..(2): n is a, c, g, or t
  modified_base (23)..(23): DNP phosphoramidite base
  misc_feature (23)..(23): n is a, c, g, or t
  modified_base (44)..(44): DNP phosphoramidite base
  misc_feature (44)..(44): n is a, c, g, or t
  modified_base (65)..(65): DNP phosphoramidite base
  misc_feature (65)..(65): n is a, c, g, or t
  modified_base (86)..(86): DNP phosphoramidite base
  misc_feature (86)..(86): n is a, c, g, or t
tncacacacaaaagactggattntggccctagtgccatagtgtngctgacacacatctgcattantctcactgggttaatagggcnt

SEQ ID NO: 550 - DNA, 87 bp, Artificial Sequence
  Synthetic Probe
  modified_base (2)..(2): DNP phosphoramidite base
  misc_feature (2)..(2): n is a, c, g, or t
  modified_base (23)..(23): DNP phosphoramidite base
  misc_feature (23)..(23): n is a, c, g, or t
  modified_base (44)..(44): DNP phosphoramidite base
  misc_feature (44)..(44): n is a, c, g, or t
  modified_base (65)..(65): DNP phosphoramidite base
  misc_feature (65)..(65): n is a, c, g, or t
  modified_base (86)..(86): DNP phosphoramidite base
  misc_feature (86)..(86): n is a, c, g, or t
tncgctagccttttttcccaccnctactgcctcatcactttctngccaccctctgccactgaganctgatggggttttagtcaatnt

SEQ ID NO: 551 - DNA, 87 bp, Artificial Sequence
  Synthetic Probe
  modified_base (2)..(2): DNP phosphoramidite base
  misc_feature (2)..(2): n is a, c, g, or t
  modified_base (23)..(23): DNP phosphoramidite base
  misc_feature (23)..(23): n is a, c, g, or t
  modified_base (44)..(44): DNP phosphoramidite base
  misc_feature (44)..(44): n is a, c, g, or t
  modified_base (65)..(65): DNP phosphoramidite base
  misc_feature (65)..(65): n is a, c, g, or t
  modified_base (86)..(86): DNP phosphoramidite base
  misc_feature (86)..(86): n is a, c, g, or t
tntagacaaggatcaattacaanggataggcagcaatcttaagnggtttgagcgctggagtgtcnctgatcgggtttgggcgtttnt

SEQ ID NO: 552 - DNA, 87 bp, Artificial Sequence
  Synthetic Probe
  modified_base (2)..(2): DNP phosphoramidite base
  misc_feature (2)..(2): n is a, c, g, or t
  modified_base (23)..(23): DNP phosphoramidite base
  misc_feature (23)..(23): n is a, c, g, or t
  modified_base (44)..(44): DNP phosphoramidite base
  misc_feature (44)..(44): n is a, c, g, or t
  modified_base (65)..(65): DNP phosphoramidite base
  misc_feature (65)..(65): n is a, c, g, or t
  modified_base (86)..(86): DNP phosphoramidite base
  misc_feature (86)..(86): n is a, c, g, or t
tnaatccgcattccccacagtcnactggacaggaatctcggcgntggagacacccgttcaatttnccaggggtctaccttcccctnt

SEQ ID NO: 553 - DNA, 87 bp, Artificial Sequence
  Synthetic Probe
  modified_base (2)..(2): DNP phosphoramidite base
  misc_feature (2)..(2): n is a, c, g, or t
  modified_base (23)..(23): DNP phosphoramidite base
  misc_feature (23)..(23): n is a, c, g, or t
  modified_base (44)..(44): DNP phosphoramidite base
  misc_feature (44)..(44): n is a, c, g, or t
  modified_base (65)..(65): DNP phosphoramidite base
  misc_feature (65)..(65): n is a, c, g, or t
  modified_base (86)..(86): DNP phosphoramidite base
  misc_feature (86)..(86): n is a, c, g, or t
tncggagggttcccagagtgtcnccataggtggcaaagcgagcnctcaagccgtagaactgactnagggaagcggcggccacttant

SEQ ID NO: 554 - DNA, 87 bp, Artificial Sequence
  Synthetic Probe
  modified_base (2)..(2): DNP phosphoramidite base
  misc_feature (2)..(2): n is a, c, g, or t
  modified_base (23)..(23): DNP phosphoramidite base
  misc_feature (23)..(23): n is a, c, g, or t
  modified_base (44)..(44): DNP phosphoramidite base
  misc_feature (44)..(44): n is a, c, g, or t
  modified_base (65)..(65): DNP phosphoramidite base
  misc_feature (65)..(65): n is a, c, g, or t
  modified_base (86)..(86): DNP phosphoramidite base
  misc_feature (86)..(86): n is a, c, g, or t
tnctgcgccccatgcgcgagctngcctcacctttcagtaactcnttgcctgttttttggctgcgngagtctccagagtgactcgtnt

SEQ ID NO: 555 - DNA, 87 bp, Artificial Sequence
  Synthetic Probe
  modified_base (2)..(2): DNP phosphoramidite base
  misc_feature (2)..(2): n is a, c, g, or t
  modified_base (23)..(23): DNP phosphoramidite base
  misc_feature (23)..(23): n is a, c, g, or t
  modified_base (44)..(44): DNP phosphoramidite base
  misc_feature (44)..(44): n is a, c, g, or t
  modified_base (65)..(65): DNP phosphoramidite base
  misc_feature (65)..(65): n is a, c, g, or t
  modified_base (86)..(86): DNP phosphoramidite base
  misc_feature (86)..(86): n is a, c, g, or t
tnatgtgttgggttgtgtttgantgagttagagacccagaaaancaaatccagactattgctgtntgttactgtgtctagtagtgnt

SEQ ID NO: 556 - DNA, 87 bp, Artificial Sequence
  Synthetic Probe
  modified_base (2)..(2): DNP phosphoramidite base
  misc_feature (2)..(2): n is a, c, g, or t
  modified_base (23)..(23): DNP phosphoramidite base
  misc_feature (23)..(23): n is a, c, g, or t
  modified_base (44)..(44): DNP phosphoramidite base
  misc_feature (44)..(44): n is a, c, g, or t
  modified_base (65)..(65): DNP phosphoramidite base
  misc_feature (65)..(65): n is a, c, g, or t
  modified_base (86)..(86): DNP phosphoramidite base
  misc_feature (86)..(86): n is a, c, g, or t
tncctgcctcccatggccactcntcctactttgggttcatgggngcttgatttttaatgaagcangggtacaggaattagatgtant

SEQ ID NO: 557 - DNA, 87 bp, Artificial Sequence
  Synthetic Probe
  modified_base (2)..(2): DNP phosphoramidite base
  misc_feature (2)..(2): n is a, c, g, or t
  modified_base (23)..(23): DNP phosphoramidite base
  misc_feature (23)..(23): n is a, c, g, or t
  modified_base (44)..(44): DNP phosphoramidite base
  misc_feature (44)..(44): n is a, c, g, or t
  modified_base (65)..(65): DNP phosphoramidite base
  misc_feature (65)..(65): n is a, c, g, or t
  modified_base (86)..(86): DNP phosphoramidite base
  misc_feature (86)..(86): n is a, c, g, or t
tngtgcgttcaggagatgacatnattacccagtaagttagtgtnatgaggcaggaagtgagactngctaccagattttgctacacnt

SEQ ID NO: 558 - DNA, 87 bp, Artificial Sequence
  Synthetic Probe
  modified_base (2)..(2): DNP phosphoramidite base
  misc_feature (2)..(2): n is a, c, g, or t
  modified_base (23)..(23): DNP phosphoramidite base
  misc_feature (23)..(23): n is a, c, g, or t
  modified_base (44)..(44): DNP phosphoramidite base
  misc_feature (44)..(44): n is a, c, g, or t
  modified_base (65)..(65): DNP phosphoramidite base
  misc_feature (65)..(65): n is a, c, g, or t
  modified_base (86)..(86): DNP phosphoramidite base
  misc_feature (86)..(86): n is a, c, g, or t
tntgacagttacagtattgaaangatcatagtgcagcagttggnaagggtggattgaagaggcanaagaggtggaggcacaatatnt

SEQ ID NO: 559 - DNA, 87 bp, Artificial Sequence
  Synthetic Probe
  modified_base (2)..(2): DNP phosphoramidite base
  misc_feature (2)..(2): n is a, c, g, or t
  modified_base (23)..(23): DNP phosphoramidite base
  misc_feature (23)..(23): n is a, c, g, or t
  modified_base (44)..(44): DNP phosphoramidite base
  misc_feature (44)..(44): n is a, c, g, or t
  modified_base (65)..(65): DNP phosphoramidite base
  misc_feature (65)..(65): n is a, c, g, or t
  modified_base (86)..(86): DNP phosphoramidite base
  misc_feature (86)..(86): n is a, c, g, or t
tnttggagcccttgtttttgacnattggatcctatactgtgagnagctggttatgctggtgaggnactgccccaaggtaagtgtant

SEQ ID NO: 560 - DNA, 87 bp, Artificial Sequence
  Synthetic Probe
  modified_base (2)..(2): DNP phosphoramidite base
  misc_feature (2)..(2): n is a, c, g, or t
  modified_base (23)..(23): DNP phosphoramidite base
  misc_feature (23)..(23): n is a, c, g, or t
  modified_base (44)..(44): DNP phosphoramidite base
  misc_feature (44)..(44): n is a, c, g, or t
  modified_base (65)..(65): DNP phosphoramidite base
  misc_feature (65)..(65): n is a, c, g, or t
  modified_base (86)..(86): DNP phosphoramidite base
  misc_feature (86)..(86): n is a, c, g, or t
tnaaaaatgccttcttgatgaanaggtgaaacttgtatgtcatngtttctgactcttacaggtgngattttcctacagctattggnt

SEQ ID NO: 561 - DNA, 87 bp, Artificial Sequence
  Synthetic Probe
  modified_base (2)..(2): DNP phosphoramidite base
  misc_feature (2)..(2): n is a, c, g, or t
  modified_base (23)..(23): DNP phosphoramidite base
  misc_feature (23)..(23): n is a, c, g, or t
  modified_base (44)..(44): DNP phosphoramidite base
  misc_feature (44)..(44): n is a, c, g, or t
  modified_base (65)..(65): DNP phosphoramidite base
  misc_feature (65)..(65): n is a, c, g, or t
  modified_base (86)..(86): DNP phosphoramidite base
  misc_feature (86)..(86): n is a, c, g, or t
tnacggaagcacattaatggaanatagatggcgataaaggcaanacaaggcggtcccacctactnacatagatactaatgctctgnt

SEQ ID NO: 562 - DNA, 87 bp, Artificial Sequence
  Synthetic Probe
  modified_base (2)..(2): DNP phosphoramidite base
  misc_feature (2)..(2): n is a, c, g, or t
  modified_base (23)..(23): DNP phosphoramidite base
  misc_feature (23)..(23): n is a, c, g, or t
  modified_base (44)..(44): DNP phosphoramidite base
  misc_feature (44)..(44): n is a, c, g, or t
  modified_base (65)..(65): DNP phosphoramidite base
  misc_feature (65)..(65): n is a, c, g, or t
  modified_base (86)..(86): DNP phosphoramidite base
  misc_feature (86)..(86): n is a, c, g, or t
tntgtttgaacactacaacatcncctgccttcttcctttgcaanaactgcagttttgacagcgtnatccttgaaagagtaataccnt

SEQ ID NO: 563 - DNA, 87 bp, Artificial Sequence
  Synthetic Probe
  modified_base (2)..(2): DNP phosphoramidite base
  misc_feature (2)..(2): n is a, c, g, or t
  modified_base (23)..(23): DNP phosphoramidite base
  misc_feature (23)..(23): n is a, c, g, or t
  modified_base (44)..(44): DNP phosphoramidite base
  misc_feature (44)..(44): n is a, c, g, or t
  modified_base (65)..(65): DNP phosphoramidite base
  misc_feature (65)..(65): n is a, c, g, or t
  modified_base (86)..(86): DNP phosphoramidite base
  misc_feature (86)..(86): n is a, c, g, or t
tnccctgctatttgcttctctcntgtcctactgccacagcattnaggtggaagctatttccaggnattactgaagcacgtcctctnt

SEQ ID NO: 564 - DNA, 87 bp, Artificial Sequence
  Synthetic Probe
  modified_base (2)..(2): DNP phosphoramidite base
  misc_feature (2)..(2): n is a, c, g, or t
  modified_base (23)..(23): DNP phosphoramidite base
  misc_feature (23)..(23): n is a, c, g, or t
  modified_base (44)..(44): DNP phosphoramidite base
  misc_feature (44)..(44): n is a, c, g, or t
  modified_base (65)..(65): DNP phosphoramidite base
  misc_feature (65)..(65): n is a, c, g, or t
  modified_base (86)..(86): DNP phosphoramidite base
  misc_feature (86)..(86): n is a, c, g, or t
tnttctacatttcttcctttatntttactttcagaccgtgctgnaggtacttgcagttctctgancctcgctgtgttctcttgctnt

SEQ ID NO: 565 - DNA, 87 bp, Artificial Sequence
  Synthetic Probe
  modified_base (2)..(2): DNP phosphoramidite base
  misc_feature (2)..(2): n is a, c, g, or t
  modified_base (23)..(23): DNP phosphoramidite base
  misc_feature (23)..(23): n is a, c, g, or t
  modified_base (44)..(44): DNP phosphoramidite base
  misc_feature (44)..(44): n is a, c, g, or t
  modified_base (65)..(65): DNP phosphoramidite base
  misc_feature (65)..(65): n is a, c, g, or t
  modified_base (86)..(86): DNP phosphoramidite base
  misc_feature (86)..(86): n is a, c, g, or t
tnaggataaccttcagggaaaanggcagttttggtgcaccattngtgtgtctactgtgttaaagngaattttagtgccaggtgagnt

SEQ ID NO: 566 - DNA, 87 bp, Artificial Sequence
  Synthetic Probe
  modified_base (2)..(2): DNP phosphoramidite base
  misc_feature (2)..(2): n is a, c, g, or t
  modified_base (23)..(23): DNP phosphoramidite base
  misc_feature (23)..(23): n is a, c, g, or t
  modified_base (44)..(44): DNP phosphoramidite base
  misc_feature (44)..(44): n is a, c, g, or t
  modified_base (65)..(65): DNP phosphoramidite base
  misc_feature (65)..(65): n is a, c, g, or t
  modified_base (86)..(86): DNP phosphoramidite base
  misc_feature (86)..(86): n is a, c, g, or t
tngaaaatgggatctgccaatantttaccaactgtggaattcancctggaatagttttcccgctncattgagttggaggagatagnt

SEQ ID NO: 567 - DNA, 87 bp, Artificial Sequence
  Synthetic Probe
  modified_base (2)..(2): DNP phosphoramidite base
  misc_feature (2)..(2): n is a, c, g, or t
  modified_base (23)..(23): DNP phosphoramidite base
  misc_feature (23)..(23): n is a, c, g, or t
  modified_base (44)..(44): DNP phosphoramidite base
  misc_feature (44)..(44): n is a, c, g, or t
  modified_base (65)..(65): DNP phosphoramidite base
  misc_feature (65)..(65): n is a, c, g, or t
  modified_base (86)..(86): DNP phosphoramidite base
  misc_feature (86)..(86): n is a, c, g, or t
tnaaactagatttgctaatggtncgttctactgggctgattttnggacagtggagccactcatanccactgcaattccagtccacnt

SEQ ID NO: 568 - DNA, 87 bp, Artificial Sequence
  Synthetic Probe
  modified_base (2)..(2): DNP phosphoramidite base
  misc_feature (2)..(2): n is a, c, g, or t
  modified_base (23)..(23): DNP phosphoramidite base
  misc_feature (23)..(23): n is a, c, g, or t
  modified_base (44)..(44): DNP phosphoramidite base
  misc_feature (44)..(44): n is a, c, g, or t
  modified_base (65)..(65): DNP phosphoramidite base
  misc_feature (65)..(65): n is a, c, g, or t
  modified_base (86)..(86): DNP phosphoramidite base
  misc_feature (86)..(86): n is a, c, g, or t
tnagttattcacataaatacacnccacagaggaaattcgttcanaggaagtttggacttactgcncctcttagccttgtttcatcnt

SEQ ID NO: 569 - DNA, 87 bp, Artificial Sequence
  Synthetic Probe
  modified_base (2)..(2): DNP phosphoramidite base
  misc_feature (2)..(2): n is a, c, g, or t
  modified_base (23)..(23): DNP phosphoramidite base
  misc_feature (23)..(23): n is a, c, g, or t
  modified_base (44)..(44): DNP phosphoramidite base
  misc_feature (44)..(44): n is a, c, g, or t
  modified_base (65)..(65): DNP phosphoramidite base
  misc_feature (65)..(65): n is a, c, g, or t
  modified_base (86)..(86): DNP phosphoramidite base
  misc_feature (86)..(86): n is a, c, g, or t
tngaattttctttgtagaacttnacttctagctcccccaccccntatgaagtgaactccattaancctagcatctcttggtactcnt

SEQ ID NO: 570 - DNA, 87 bp, Artificial Sequence
  Synthetic Probe
  modified_base (2)..(2): DNP phosphoramidite base
  misc_feature (2)..(2): n is a, c, g, or t
  modified_base (23)..(23): DNP phosphoramidite base
  misc_feature (23)..(23): n is a, c, g, or t
  modified_base (44)..(44): DNP phosphoramidite base
  misc_feature (44)..(44): n is a, c, g, or t
  modified_base (65)..(65): DNP phosphoramidite base
  misc_feature (65)..(65): n is a, c, g, or t
  modified_base (86)..(86): DNP phosphoramidite base
  misc_feature (86)..(86): n is a, c, g, or t
tntgtttttgttcagaacaaggnaacccatgagagattctcttntactaaaaacccatctctganacatatggcttactgatgggnt

SEQ ID NO: 571 - DNA, 87 bp, Artificial Sequence
  Synthetic Probe
  modified_base (2)..(2): DNP phosphoramidite base
  misc_feature (2)..(2): n is a, c, g, or t
  modified_base (23)..(23): DNP phosphoramidite base
  misc_feature (23)..(23): n is a, c, g, or t
  modified_base (44)..(44): DNP phosphoramidite base
  misc_feature (44)..(44): n is a, c, g, or t
  modified_base (65)..(65): DNP phosphoramidite base
  misc_feature (65)..(65): n is a, c, g, or t
  modified_base (86)..(86): DNP phosphoramidite base
  misc_feature (86)..(86): n is a, c, g, or t
tnttaaggagaaagtggtgttcntgaaattggttttgttatgcnagaactgtggtgcaggggttncctgcacctgcagttatttant

SEQ ID NO: 572 - DNA, 87 bp, Artificial Sequence
  Synthetic Probe
  modified_base (2)..(2): DNP phosphoramidite base
  misc_feature (2)..(2): n is a, c, g, or t
  modified_base (23)..(23): DNP phosphoramidite base
  misc_feature (23)..(23): n is a, c, g, or t
  modified_base (44)..(44): DNP phosphoramidite base
  misc_feature (44)..(44): n is a, c, g, or t
  modified_base (65)..(65): DNP phosphoramidite base
  misc_feature (65)..(65): n is a, c, g, or t
  modified_base (86)..(86): DNP phosphoramidite base
  misc_feature (86)..(86): n is a, c, g, or t
tngtcttttgtgtaatacggttntaatatgttttcagagtggcntgcacagatgccaactgttcnattatgaattccccaatggcnt

SEQ ID NO: 573 - DNA, 87 bp, Artificial Sequence
  Synthetic Probe
  modified_base (2)..(2): DNP phosphoramidite base
  misc_feature (2)..(2): n is a, c, g, or t
  modified_base (23)..(23): DNP phosphoramidite base
  misc_feature (23)..(23): n is a, c, g, or t
  modified_base (44)..(44): DNP phosphoramidite base
  misc_feature (44)..(44): n is a, c, g, or t
  modified_base (65)..(65): DNP phosphoramidite base
  misc_feature (65)..(65): n is a, c, g, or t
  modified_base (86)..(86): DNP phosphoramidite base
  misc_feature (86)..(86): n is a, c, g, or t
tnagtaagtgccagtctcctgtntacggtttaaaggtatctttntaggggactgaaatgtccccnaaatcattgttaggttgacant

SEQ ID NO: 574 - DNA, 87 bp, Artificial Sequence
  Synthetic Probe
  modified_base (2)..(2): DNP phosphoramidite base
  misc_feature (2)..(2): n is a, c, g, or t
  modified_base (23)..(23): DNP phosphoramidite base
  misc_feature (23)..(23): n is a, c, g, or t
  modified_base (44)..(44): DNP phosphoramidite base
  misc_feature (44)..(44): n is a, c, g, or t
  modified_base (65)..(65): DNP phosphoramidite base
  misc_feature (65)..(65): n is a, c, g, or t
  modified_base (86)..(86): DNP phosphoramidite base
  misc_feature (86)..(86): n is a, c, g, or t
tntaatgaatacagataagcatnggcccaagctgtggtcaaggnccagttagaaactatccttgntcctttaggaggtgataacant

SEQ ID NO: 575 - DNA, 87 bp, Artificial Sequence
  Synthetic Probe
  modified_base (2)..(2): DNP phosphoramidite base
  misc_feature (2)..(2): n is a, c, g, or t
  modified_base (23)..(23): DNP phosphoramidite base
  misc_feature (23)..(23): n is a, c, g, or t
  modified_base (44)..(44): DNP phosphoramidite base
  misc_feature (44)..(44): n is a, c, g, or t
  modified_base (65)..(65): DNP phosphoramidite base
  misc_feature (65)..(65): n is a, c, g, or t
  modified_base (86)..(86): DNP phosphoramidite base
  misc_feature (86)..(86): n is a, c, g, or t
tnaactaacctgatatctgatgngttgtgtttttatttagaagnggttggggtgaactaaggagnggattaggatagcatgaaagnt

SEQ ID NO: 576 - DNA, 87 bp, Artificial Sequence
  Synthetic Probe
  modified_base (2)..(2): DNP phosphoramidite base
  misc_feature (2)..(2): n is a, c, g, or t
  modified_base (23)..(23): DNP phosphoramidite base
  misc_feature (23)..(23): n is a, c, g, or t
  modified_base (44)..(44): DNP phosphoramidite base
  misc_feature (44)..(44): n is a, c, g, or t
  modified_base (65)..(65): DNP phosphoramidite base
  misc_feature (65)..(65): n is a, c, g, or t
  modified_base (86)..(86): DNP phosphoramidite base
  misc_feature (86)..(86): n is a, c, g, or t
tntgcggttgaaattgattgcanaataatacaacagtggaacgngaggtttagctcatggattgngcggctccattctagcctctnt

SEQ ID NO: 577 - DNA, 87 bp, Artificial Sequence
  Synthetic Probe
  modified_base (2)..(2): DNP phosphoramidite base
  misc_feature (2)..(2): n is a, c, g, or t
  modified_base (23)..(23): DNP phosphoramidite base
  misc_feature (23)..(23): n is a, c, g, or t
  modified_base (44)..(44): DNP phosphoramidite base
  misc_feature (44)..(44): n is a, c, g, or t
  modified_base (65)..(65): DNP phosphoramidite base
  misc_feature (65)..(65): n is a, c, g, or t
  modified_base (86)..(86): DNP phosphoramidite base
  misc_feature (86)..(86): n is a, c, g, or t
tnggagtgcatttaaaatgaaanacattgcttctcaagttctgngtcattccccagtctgcagtngagatctacagtgaggtctant

SEQ ID NO: 578 - DNA, 87 bp, Artificial Sequence
  Synthetic Probe
  modified_base (2)..(2): DNP phosphoramidite base
  misc_feature (2)..(2): n is a, c, g, or t
  modified_base (23)..(23): DNP phosphoramidite base
  misc_feature (23)..(23): n is a, c, g, or t
  modified_base (44)..(44): DNP phosphoramidite base
  misc_feature (44)..(44): n is a, c, g, or t
  modified_base (65)..(65): DNP phosphoramidite base
  misc_feature (65)..(65): n is a, c, g, or t
  modified_base (86)..(86): DNP phosphoramidite base
  misc_feature (86)..(86): n is a, c, g, or t
tngtaagatgttgcttggactanccatctgccttgaataaggancaaaaagtccttgtacttttnctgcatcctggacttagagcnt

SEQ ID NO: 579 - DNA, 87 bp, Artificial Sequence
  Synthetic Probe
  modified_base (2)..(2): DNP phosphoramidite base
  misc_feature (2)..(2): n is a, c, g, or t
  modified_base (23)..(23): DNP phosphoramidite base
  misc_feature (23)..(23): n is a, c, g, or t
  modified_base (44)..(44): DNP phosphoramidite base
  misc_feature (44)..(44): n is a, c, g, or t
  modified_base (65)..(65): DNP phosphoramidite base
  misc_feature (65)..(65): n is a, c, g, or t
  modified_base (86)..(86): DNP phosphoramidite base
  misc_feature (86)..(86): n is a, c, g, or t
tnatgtcattaagtactcattcnaagccttctgacagtttctgnttattgccttaggttggcatncaagccatcacacctaaaccnt

SEQ ID NO: 580 - DNA, 87 bp, Artificial Sequence
  Synthetic Probe
  modified_base (2)..(2): DNP phosphoramidite base
  misc_feature (2)..(2): n is a, c, g, or t
  modified_base (23)..(23): DNP phosphoramidite base
  misc_feature (23)..(23): n is a, c, g, or t
  modified_base (44)..(44): DNP phosphoramidite base
  misc_feature (44)..(44): n is a, c, g, or t
  modified_base (65)..(65): DNP phosphoramidite base
  misc_feature (65)..(65): n is a, c, g, or t
  modified_base (86)..(86): DNP phosphoramidite base
  misc_feature (86)..(86): n is a, c, g, or t
tngaagcagtgtgtagaaagaanaatgcccttgagaaagagttncccaagcttctaccttccttnttgtcaccttacgtttcatant

SEQ ID NO: 581 - DNA, 87 bp, Artificial Sequence
  Synthetic Probe
  modified_base (2)..(2): DNP phosphoramidite base
  misc_feature (2)..(2): n is a, c, g, or t
  modified_base (23)..(23): DNP phosphoramidite base
  misc_feature (23)..(23): n is a, c, g, or t
  modified_base (44)..(44): DNP phosphoramidite base
  misc_feature (44)..(44): n is a, c, g, or t
  modified_base (65)..(65): DNP phosphoramidite base
  misc_feature (65)..(65): n is a, c, g, or t
  modified_base (86)..(86): DNP phosphoramidite base
  misc_feature (86)..(86): n is a, c, g, or t
tnactattattcaaattcaaaanactacggtattgcctttgctngtggcagttaccatcaccttncacactctaaggtagcaggtnt

SEQ ID NO: 582 - DNA, 87 bp, Artificial Sequence
  Synthetic Probe
  modified_base (2)..(2): DNP phosphoramidite base
  misc_feature (2)..(2): n is a, c, g, or t
  modified_base (23)..(23): DNP phosphoramidite base
  misc_feature (23)..(23): n is a, c, g, or t
  modified_base (44)..(44): DNP phosphoramidite base
  misc_feature (44)..(44): n is a, c, g, or t
  modified_base (65)..(65): DNP phosphoramidite base
  misc_feature (65)..(65): n is a, c, g, or t
  modified_base (86)..(86): DNP phosphoramidite base
  misc_feature (86)..(86): n is a, c, g, or t
tnggaaacaaggcaagagttctngacttcgatgaaaggtaggtnagctaagacttgcaggaatanctgggaggaaaagagtttaant

SEQ ID NO: 583 - DNA, 87 bp, Artificial Sequence
  Synthetic Probe
  modified_base (2)..(2): DNP phosphoramidite base
  misc_feature (2)..(2): n is a, c, g, or t
  modified_base (23)..(23): DNP phosphoramidite base
  misc_feature (23)..(23): n is a, c, g, or t
  modified_base (44)..(44): DNP phosphoramidite base
  misc_feature (44)..(44): n is a, c, g, or t
  modified_base (65)..(65): DNP phosphoramidite base
  misc_feature (65)..(65): n is a, c, g, or t
  modified_base (86)..(86): DNP phosphoramidite base
  misc_feature (86)..(86): n is a, c, g, or t
tnatttgatgaagacacagactngcactagggcaaagacaatgnggagaagaaaagacagatccntggagacattctgcagcaagnt

SEQ ID NO: 584 - DNA, 87 bp, Artificial Sequence
  Synthetic Probe
  modified_base (2)..(2): DNP phosphoramidite base
  misc_feature (2)..(2): n is a, c, g, or t
  modified_base (23)..(23): DNP phosphoramidite base
  misc_feature (23)..(23): n is a, c, g, or t
  modified_base (44)..(44): DNP phosphoramidite base
  misc_feature (44)..(44): n is a, c, g, or t
  modified_base (65)..(65): DNP phosphoramidite base
  misc_feature (65)..(65): n is a, c, g, or t
  modified_base (86)..(86): DNP phosphoramidite base
  misc_feature (86)..(86): n is a, c, g, or t
tncaatggtgatgaaaaagatgnactgacggtttagggctaatngtagactggatgtactacagnataaaatgagaggtagctggnt

SEQ ID NO: 585 - DNA, 87 bp, Artificial Sequence
  Synthetic Probe
  modified_base (2)..(2): DNP phosphoramidite base
  misc_feature (2)..(2): n is a, c, g, or t
  modified_base (23)..(23): DNP phosphoramidite base
  misc_feature (23)..(23): n is a, c, g, or t
  modified_base (44)..(44): DNP phosphoramidite base
  misc_feature (44)..(44): n is a, c, g, or t
  modified_base (65)..(65): DNP phosphoramidite base
  misc_feature (65)..(65): n is a, c, g, or t
  modified_base (86)..(86): DNP phosphoramidite base
  misc_feature (86)..(86): n is a, c, g, or t
tnagagttgttaaaagctgtggnttcttgtgctgctatcgtgcntgctatgatttcccctttaanttttccagctgccttcccagnt

SEQ ID NO: 586 - DNA, 87 bp, Artificial Sequence
  Synthetic Probe
  modified_base (2)..(2): DNP phosphoramidite base
  misc_feature (2)..(2): n is a, c, g, or t
  modified_base (23)..(23): DNP phosphoramidite base
  misc_feature (23)..(23): n is a, c, g, or t
  modified_base (44)..(44): DNP phosphoramidite base
  misc_feature (44)..(44): n is a, c, g, or t
  modified_base (65)..(65): DNP phosphoramidite base
  misc_feature (65)..(65): n is a, c, g, or t
  modified_base (86)..(86): DNP phosphoramidite base
  misc_feature (86)..(86): n is a, c, g, or t
tnagcaatacttttcccttctanattgcagttttggggattaanactatatcctctggctttgtnctccttttggatatggcccant

SEQ ID NO: 587 - DNA, 87 bp, Artificial Sequence
  Synthetic Probe
  modified_base (2)..(2): DNP phosphoramidite base
  misc_feature (2)..(2): n is a, c, g, or t
  modified_base (23)..(23): DNP phosphoramidite base
  misc_feature (23)..(23): n is a, c, g, or t
  modified_base (44)..(44): DNP phosphoramidite base
  misc_feature (44)..(44): n is a, c, g, or t
  modified_base (65)..(65): DNP phosphoramidite base
  misc_feature (65)..(65): n is a, c, g, or t
  modified_base (86)..(86): DNP phosphoramidite base
  misc_feature (86)..(86): n is a, c, g, or t
tncagtgagtggttcatgggaancactgcactcctctatcatanacagaagccctatgttctccnctgttcaatgataaacctaant

SEQ ID NO: 588 - DNA, 87 bp, Artificial Sequence
  Synthetic Probe
  modified_base (2)..(2): DNP phosphoramidite base
  misc_feature (2)..(2): n is a, c, g, or t
  modified_base (23)..(23): DNP phosphoramidite base
  misc_feature (23)..(23): n is a, c, g, or t
  modified_base (44)..(44): DNP phosphoramidite base
  misc_feature (44)..(44): n is a, c, g, or t
  modified_base (65)..(65): DNP phosphoramidite base
  misc_feature (65)..(65): n is a, c, g, or t
  modified_base (86)..(86): DNP phosphoramidite base
  misc_feature (86)..(86): n is a, c, g, or t
tntataatgtcaagagtacaggngaaggtctctaaccaaaatgnccttccccattctgcctacgntttaaaagtctaatgatattnt

SEQ ID NO: 589 - DNA, 87 bp, Artificial Sequence
  Synthetic Probe
  modified_base (2)..(2): DNP phosphoramidite base
  misc_feature (2)..(2): n is a, c, g, or t
  modified_base (23)..(23): DNP phosphoramidite base
  misc_feature (23)..(23): n is a, c, g, or t
  modified_base (44)..(44): DNP phosphoramidite base
  misc_feature (44)..(44): n is a, c, g, or t
  modified_base (65)..(65): DNP phosphoramidite base
  misc_feature (65)..(65): n is a, c, g, or t
  modified_base (86)..(86): DNP phosphoramidite base
  misc_feature (86)..(86): n is a, c, g, or t
tnctttgggttgaacagcctccnccaccgaaggaggtttatttnacaccaggtcttctcagttantttacacctcagcatgaaggnt

SEQ ID NO: 590 - DNA, 87 bp, Artificial Sequence
  Synthetic Probe
  modified_base (2)..(2): DNP phosphoramidite base
  misc_feature (2)..(2): n is a, c, g, or t
  modified_base (23)..(23): DNP phosphoramidite base
  misc_feature (23)..(23): n is a, c, g, or t
  modified_base (44)..(44): DNP phosphoramidite base
  misc_feature (44)..(44): n is a, c, g, or t
  modified_base (65)..(65): DNP phosphoramidite base
  misc_feature (65)..(65): n is a, c, g, or t
  modified_base (86)..(86): DNP phosphoramidite base
  misc_feature (86)..(86): n is a, c, g, or t
tnatgaggcatggatttccactnctcatcttagaagagccacangtgttaactacataccagatngattcttccaaagatgtctcnt

SEQ ID NO: 591 - DNA, 87 bp, Artificial Sequence
  Synthetic Probe
  modified_base (2)..(2): DNP phosphoramidite base
  misc_feature (2)..(2): n is a, c, g, or t
  modified_base (23)..(23): DNP phosphoramidite base
  misc_feature (23)..(23): n is a, c, g, or t
  modified_base (44)..(44): DNP phosphoramidite base
  misc_feature (44)..(44): n is a, c, g, or t
  modified_base (65)..(65): DNP phosphoramidite base
  misc_feature (65)..(65): n is a, c, g, or t
  modified_base (86)..(86): DNP phosphoramidite base
  misc_feature (86)..(86): n is a, c, g, or t
tngctctttcttgaccagtctgnaagaagccttagggcatcttnctctttcctggacaactttantctaatgcatccatggaatcnt

SEQ ID NO: 592 - DNA, 87 bp, Artificial Sequence
  Synthetic Probe
  modified_base (2)..(2): DNP phosphoramidite base
  misc_feature (2)..(2): n is a, c, g, or t
  modified_base (23)..(23): DNP phosphoramidite base
  misc_feature (23)..(23): n is a, c, g, or t
  modified_base (44)..(44): DNP phosphoramidite base
  misc_feature (44)..(44): n is a, c, g, or t
  modified_base (65)..(65): DNP phosphoramidite base
  misc_feature (65)..(65): n is a, c, g, or t
  modified_base (86)..(86): DNP phosphoramidite base
  misc_feature (86)..(86): n is a, c, g, or t
tntggtctcaactaatcactgtngtccttgacatgcagacacangatattgtggcctgcttggtnagctgttgctactacagggant

SEQ ID NO: 593 - DNA, 87 bp, Artificial Sequence
  Synthetic Probe
  modified_base (2)..(2): DNP phosphoramidite base
  misc_feature (2)..(2): n is a, c, g, or t
  modified_base (23)..(23): DNP phosphoramidite base
  misc_feature (23)..(23): n is a, c, g, or t
  modified_base (44)..(44): DNP phosphoramidite base
  misc_feature (44)..(44): n is a, c, g, or t
  modified_base (65)..(65): DNP phosphoramidite base
  misc_feature (65)..(65): n is a, c, g, or t
  modified_base (86)..(86): DNP phosphoramidite base
  misc_feature (86)..(86): n is a, c, g, or t
tntagtaaagctggttgttcacntaactgcattaaagagtttgncctaagcaagggtaagacttngaggcttccagctgaaatccnt

SEQ ID NO: 594 - DNA, 87 bp, Artificial Sequence
  Synthetic Probe
  modified_base (2)..(2): DNP phosphoramidite base
  misc_feature (2)..(2): n is a, c, g, or t
  modified_base (23)..(23): DNP phosphoramidite base
  misc_feature (23)..(23): n is a, c, g, or t
  modified_base (44)..(44): DNP phosphoramidite base
  misc_feature (44)..(44): n is a, c, g, or t
  modified_base (65)..(65): DNP phosphoramidite base
  misc_feature (65)..(65): n is a, c, g, or t
  modified_base (86)..(86): DNP phosphoramidite base
  misc_feature (86)..(86): n is a, c, g, or t
tnggtttcattttataccttctnttgattttctccagggatcgnttatgtccttccatcttaaanggcagtgtggtaaaaatggcnt

SEQ ID NO: 595 - DNA, 87 bp, Artificial Sequence
  Synthetic Probe
  modified_base (2)..(2): DNP phosphoramidite base
  misc_feature (2)..(2): n is a, c, g, or t
  modified_base (23)..(23): DNP phosphoramidite base
  misc_feature (23)..(23): n is a, c, g, or t
  modified_base (44)..(44): DNP phosphoramidite base
  misc_feature (44)..(44): n is a, c, g, or t
  modified_base (65)..(65): DNP phosphoramidite base
  misc_feature (65)..(65): n is a, c, g, or t
  modified_base (86)..(86): DNP phosphoramidite base
  misc_feature (86)..(86): n is a, c, g, or t
tnaaatacaggaaccacatactncactccttttagctgtaatcnatgtataccagtctccagccntctcccaatccttaccttatnt

SEQ ID NO: 596 - DNA, 87 bp, Artificial Sequence
  Synthetic Probe
  modified_base (2)..(2): DNP phosphoramidite base
  misc_feature (2)..(2): n is a, c, g, or t
  modified_base (23)..(23): DNP phosphoramidite base
  misc_feature (23)..(23): n is a, c, g, or t
  modified_base (44)..(44): DNP phosphoramidite base
  misc_feature (44)..(44): n is a, c, g, or t
  modified_base (65)..(65): DNP phosphoramidite base
  misc_feature (65)..(65): n is a, c, g, or t
  modified_base (86)..(86): DNP phosphoramidite base
  misc_feature (86)..(86): n is a, c, g, or t
tntgggataataagtgggacagngcaataagtaccagaagaatntaagtgggggagatgagaaancatctcttctagctaagatgnt

SEQ ID NO: 597 - DNA, 87 bp, Artificial Sequence
  Synthetic Probe
  modified_base (2)..(2): DNP phosphoramidite base
  misc_feature (2)..(2): n is a, c, g, or t
  modified_base (23)..(23): DNP phosphoramidite base
  misc_feature (23)..(23): n is a, c, g, or t
  modified_base (44)..(44): DNP phosphoramidite base
  misc_feature (44)..(44): n is a, c, g, or t
  modified_base (65)..(65): DNP phosphoramidite base
  misc_feature (65)..(65): n is a, c, g, or t
  modified_base (86)..(86): DNP phosphoramidite base
  misc_feature (86)..(86): n is a, c, g, or t
tnctacaaaccccatatactgtncttgtccacagcaggcagcanacaaaatgaggaaggaatagnaaatgtcggaggtgagcgacnt

SEQ ID NO: 598 - DNA, 87 bp, Artificial Sequence
  Synthetic Probe
  modified_base (2)..(2): DNP phosphoramidite base
  misc_feature (2)..(2): n is a, c, g, or t
  modified_base (23)..(23): DNP phosphoramidite base
  misc_feature (23)..(23): n is a, c, g, or t
  modified_base (44)..(44): DNP phosphoramidite base
  misc_feature (44)..(44): n is a, c, g, or t
  modified_base (65)..(65): DNP phosphoramidite base
  misc_feature (65)..(65): n is a, c, g, or t
  modified_base (86)..(86): DNP phosphoramidite base
  misc_feature (86)..(86): n is a, c, g, or t
tntgggctccggctctgccatcncaggcggccgttccattcttngagttgttctcggcatctcgngcatctcggcaaccaaacaant

SEQ ID NO: 599 - DNA, 87 bp, Artificial Sequence
  Synthetic Probe
  modified_base (2)..(2): DNP phosphoramidite base
  misc_feature (2)..(2): n is a, c, g, or t
  modified_base (23)..(23): DNP phosphoramidite base
  misc_feature (23)..(23): n is a, c, g, or t
  modified_base (44)..(44): DNP phosphoramidite base
  misc_feature (44)..(44): n is a, c, g, or t
  modified_base (65)..(65): DNP phosphoramidite base
  misc_feature (65)..(65): n is a, c, g, or t
  modified_base (86)..(86): DNP phosphoramidite base
  misc_feature (86)..(86): n is a, c, g, or t
tngatcgggaagatttcagggcnggatgaaactctcctacaaangaagggccaaaccggccgcangccatgttttcgcataactgnt

SEQ ID NO: 600 - DNA, 87 bp, Artificial Sequence
  Synthetic Probe
  modified_base (2)..(2): DNP phosphoramidite base
  misc_feature (2)..(2): n is a, c, g, or t
  modified_base (23)..(23): DNP phosphoramidite base
  misc_feature (23)..(23): n is a, c, g, or t
  modified_base (44)..(44): DNP phosphoramidite base
  misc_feature (44)..(44): n is a, c, g, or t
  modified_base (65)..(65): DNP phosphoramidite base
  misc_feature (65)..(65): n is a, c, g, or t
  modified_base (86)..(86): DNP phosphoramidite base
  misc_feature (86)..(86): n is a, c, g, or t
tncttgccctcacttaagatggnccacatcctgcctttgtcctncattggtaaattggctctctncagcttccgtgacccgcctcnt

SEQ ID NO: 601 - DNA, 87 bp, Artificial Sequence
  Synthetic Probe
  modified_base (2)..(2): DNP phosphoramidite base
  misc_feature (2)..(2): n is a, c, g, or t
  modified_base (23)..(23): DNP phosphoramidite base
  misc_feature (23)..(23): n is a, c, g, or t
  modified_base (44)..(44): DNP phosphoramidite base
  misc_feature (44)..(44): n is a, c, g, or t
  modified_base (65)..(65): DNP phosphoramidite base
  misc_feature (65)..(65): n is a, c, g, or t
  modified_base (86)..(86): DNP phosphoramidite base
  misc_feature (86)..(86): n is a, c, g, or t
tnacaagttgtgggcttggggcnttgacaggagagacggagcancgagctatatgaggggttttncctgaagtagccagatagatnt

SEQ ID NO: 602 - DNA, 87 bp, Artificial Sequence
  Synthetic Probe
  modified_base (2)..(2): DNP phosphoramidite base
  misc_feature (2)..(2): n is a, c, g, or t
  modified_base (23)..(23): DNP phosphoramidite base
  misc_feature (23)..(23): n is a, c, g, or t
  modified_base (44)..(44): DNP phosphoramidite base
  misc_feature (44)..(44): n is a, c, g, or t
  modified_base (65)..(65): DNP phosphoramidite base
  misc_feature (65)..(65): n is a, c, g, or t
  modified_base (86)..(86): DNP phosphoramidite base
  misc_feature (86)..(86): n is a, c, g, or t
tnttgcggatgaagctgagtctnagaaaggtatagagctgagantctgtatctctagggcacaangcttattgttgcgttccaccnt

SEQ ID NO: 603 - DNA, 87 bp, Artificial Sequence
  Synthetic Probe
  modified_base (2)..(2): DNP phosphoramidite base
  misc_feature (2)..(2): n is a, c, g, or t
  modified_base (23)..(23): DNP phosphoramidite base
  misc_feature (23)..(23): n is a, c, g, or t
  modified_base (44)..(44): DNP phosphoramidite base
  misc_feature (44)..(44): n is a, c, g, or t
  modified_base (65)..(65): DNP phosphoramidite base
  misc_feature (65)..(65): n is a, c, g, or t
  modified_base (86)..(86): DNP phosphoramidite base
  misc_feature (86)..(86): n is a, c, g, or t
tnagatatatactgtaagctatnttgccctgtgcaatagaagcnaggtaaagaggaagtgaaacnacttaaagtcagaaagttgtnt

SEQ ID NO: 604 - DNA, 87 bp, Artificial Sequence
  Synthetic Probe
  modified_base (2)..(2): DNP phosphoramidite base
  misc_feature (2)..(2): n is a, c, g, or t
  modified_base (23)..(23): DNP phosphoramidite base
  misc_feature (23)..(23): n is a, c, g, or t
  modified_base (44)..(44): DNP phosphoramidite base
  misc_feature (44)..(44): n is a, c, g, or t
  modified_base (65)..(65): DNP phosphoramidite base
  misc_feature (65)..(65): n is a, c, g, or t
  modified_base (86)..(86): DNP phosphoramidite base
  misc_feature (86)..(86): n is a, c, g, or t
tngttctctttttacccctattnctcccagtttaatttgaattnatgccactccacaggatgagngcaatatacatagggatttgnt

SEQ ID NO: 605 - DNA, 87 bp, Artificial Sequence
  Synthetic Probe
  modified_base (2)..(2): DNP phosphoramidite base
  misc_feature (2)..(2): n is a, c, g, or t
  modified_base (23)..(23): DNP phosphoramidite base
  misc_feature (23)..(23): n is a, c, g, or t
  modified_base (44)..(44): DNP phosphoramidite base
  misc_feature (44)..(44): n is a, c, g, or t
  modified_base (65)..(65): DNP phosphoramidite base
  misc_feature (65)..(65): n is a, c, g, or t
  modified_base (86)..(86): DNP phosphoramidite base
  misc_feature (86)..(86): n is a, c, g, or t
tncccccagtttctctttccacnattattgccctttcttggggnttctcaaaggatcattaccgntgttctgcgccctttccaatnt

SEQ ID NO: 606 - DNA, 87 bp, Artificial Sequence
  Synthetic Probe
  modified_base (2)..(2): DNP phosphoramidite base
  misc_feature (2)..(2): n is a, c, g, or t
  modified_base (23)..(23): DNP phosphoramidite base
  misc_feature (23)..(23): n is a, c, g, or t
  modified_base (44)..(44): DNP phosphoramidite base
  misc_feature (44)..(44): n is a, c, g, or t
  modified_base (65)..(65): DNP phosphoramidite base
  misc_feature (65)..(65): n is a, c, g, or t
  modified_base (86)..(86): DNP phosphoramidite base
  misc_feature (86)..(86): n is a, c, g, or t
tnacaaattcctatagcctcatnccttcctaaagatctagtgcntgtcatgttcttcatcacccntctgtaaacctttctcagaant

SEQ ID NO: 607 - DNA, 87 bp, Artificial Sequence
  Synthetic Probe
  modified_base (2)..(2): DNP phosphoramidite base
  misc_feature (2)..(2): n is a, c, g, or t
  modified_base (23)..(23): DNP phosphoramidite base
  misc_feature (23)..(23): n is a, c, g, or t
  modified_base (44)..(44): DNP phosphoramidite base
  misc_feature (44)..(44): n is a, c, g, or t
  modified_base (65)..(65): DNP phosphoramidite base
  misc_feature (65)..(65): n is a, c, g, or t
  modified_base (86)..(86): DNP phosphoramidite base
  misc_feature (86)..(86): n is a, c, g, or t
tntggggtaggtaggcgttgggnagaaaaggcaaataaaggaanagttgggaccaaattgggggnaggggagggactgactacaant

SEQ ID NO: 608 - DNA, 87 bp, Artificial Sequence
  Synthetic Probe
  modified_base (2)..(2): DNP phosphoramidite base
  misc_feature (2)..(2): n is a, c, g, or t
  modified_base (23)..(23): DNP phosphoramidite base
  misc_feature (23)..(23): n is a, c, g, or t
  modified_base (44)..(44): DNP phosphoramidite base
  misc_feature (44)..(44): n is a, c, g, or t
  modified_base (65)..(65): DNP phosphoramidite base
  misc_feature (65)..(65): n is a, c, g, or t
  modified_base (86)..(86): DNP phosphoramidite base
  misc_feature (86)..(86): n is a, c, g, or t
tncaggagtgtgttataggaagnatgcttctgaatattggatgngcttataggggatgttgattnacctaggtcagtaaagtaaant

SEQ ID NO: 609 - DNA, 87 bp, Artificial Sequence
  Synthetic Probe
  modified_base (2)..(2): DNP phosphoramidite base
  misc_feature (2)..(2): n is a, c, g, or t
  modified_base (23)..(23): DNP phosphoramidite base
  misc_feature (23)..(23): n is a, c, g, or t
  modified_base (44)..(44): DNP phosphoramidite base
  misc_feature (44)..(44): n is a, c, g, or t
  modified_base (65)..(65): DNP phosphoramidite base
  misc_feature (65)..(65): n is a, c, g, or t
  modified_base (86)..(86): DNP phosphoramidite base
  misc_feature (86)..(86): n is a, c, g, or t
tntagatgcaaggaagatgattngagatttttatccaaggtaanttgagatggtggtgccctttnactgggaatgagggaaagaant

SEQ ID NO: 610 - DNA, 87 bp, Artificial Sequence
  Synthetic Probe
  modified_base (2)..(2): DNP phosphoramidite base
  misc_feature (2)..(2): n is a, c, g, or t
  modified_base (23)..(23): DNP phosphoramidite base
  misc_feature (23)..(23): n is a, c, g, or t
  modified_base (44)..(44): DNP phosphoramidite base
  misc_feature (44)..(44): n is a, c, g, or t
  modified_base (65)..(65): DNP phosphoramidite base
  misc_feature (65)..(65): n is a, c, g, or t
  modified_base (86)..(86): DNP phosphoramidite base
  misc_feature (86)..(86): n is a, c, g, or t
tngaaatttcaggctttagagangcagtgaaagatgcttatttnttggtgtcaggaggttcaggngttccagaaatcctggtagtnt

SEQ ID NO: 611 - DNA, 87 bp, Artificial Sequence
  Synthetic Probe
  modified_base (2)..(2): DNP phosphoramidite base
  misc_feature (2)..(2): n is a, c, g, or t
  modified_base (23)..(23): DNP phosphoramidite base
  misc_feature (23)..(23): n is a, c, g, or t
  modified_base (44)..(44): DNP phosphoramidite base
  misc_feature (44)..(44): n is a, c, g, or t
  modified_base (65)..(65): DNP phosphoramidite base
  misc_feature (65)..(65): n is a, c, g, or t
  modified_base (86)..(86): DNP phosphoramidite base
  misc_feature (86)..(86): n is a, c, g, or t
tnaaaatgttggcatcttggaangataagatgttatctgggccntaacatagatttcaggagagngggacagcattccagacattnt

SEQ ID NO: 612 - DNA, 87 bp, Artificial Sequence
  Synthetic Probe
  modified_base (2)..(2): DNP phosphoramidite base
  misc_feature (2)..(2): n is a, c, g, or t
  modified_base (23)..(23): DNP phosphoramidite base
  misc_feature (23)..(23): n is a, c, g, or t
  modified_base (44)..(44): DNP phosphoramidite base
  misc_feature (44)..(44): n is a, c, g, or t
  modified_base (65)..(65): DNP phosphoramidite base
  misc_feature (65)..(65): n is a, c, g, or t
  modified_base (86)..(86): DNP phosphoramidite base
  misc_feature (86)..(86): n is a, c, g, or t
tnagagtagttacacagtgaaanagataggaaccttcagtttcntaagtaacagctagatccttntcctgttcccagtggaaaggnt

SEQ ID NO: 613 - DNA, 87 bp, Artificial Sequence
  Synthetic Probe
  modified_base (2)..(2): DNP phosphoramidite base
  misc_feature (2)..(2): n is a, c, g, or t
  modified_base (23)..(23): DNP phosphoramidite base
  misc_feature (23)..(23): n is a, c, g, or t
  modified_base (44)..(44): DNP phosphoramidite base
  misc_feature (44)..(44): n is a, c, g, or t
  modified_base (65)..(65): DNP phosphoramidite base
  misc_feature (65)..(65): n is a, c, g, or t
  modified_base (86)..(86): DNP phosphoramidite base
  misc_feature (86)..(86): n is a, c, g, or t
tnccagaagtgaaattttgcctncagtttacttccagcaaggcnttgattaaattctgtcagggnggagacttgaagaggatattnt

SEQ ID NO: 614 - DNA, 87 bp, Artificial Sequence
  Synthetic Probe
  modified_base (2)..(2): DNP phosphoramidite base
  misc_feature (2)..(2): n is a, c, g, or t
  modified_base (23)..(23): DNP phosphoramidite base
  misc_feature (23)..(23): n is a, c, g, or t
  modified_base (44)..(44): DNP phosphoramidite base
  misc_feature (44)..(44): n is a, c, g, or t
  modified_base (65)..(65): DNP phosphoramidite base
  misc_feature (65)..(65): n is a, c, g, or t
  modified_base (86)..(86): DNP phosphoramidite base
  misc_feature (86)..(86): n is a, c, g, or t
tncagtatacccatatgaacctntgtataaaacagggtaattcnaatattcccagctcctgttcngacacagtggagaccatgggnt

SEQ ID NO: 615 - DNA, 87 bp, Artificial Sequence
  Synthetic Probe
  modified_base (2)..(2): DNP phosphoramidite base
  misc_feature (2)..(2): n is a, c, g, or t
  modified_base (23)..(23): DNP phosphoramidite base
  misc_feature (23)..(23): n is a, c, g, or t
  modified_base (44)..(44): DNP phosphoramidite base
  misc_feature (44)..(44): n is a, c, g, or t
  modified_base (65)..(65): DNP phosphoramidite base
  misc_feature (65)..(65): n is a, c, g, or t
  modified_base (86)..(86): DNP phosphoramidite base
  misc_feature (86)..(86): n is a, c, g, or t
tnaatgctgactatatttctgtnctcaaggctctatacgaacanaagtagaggcttagaaaatgnggagattgtctggaccatctnt

SEQ ID NO: 616 - DNA, 87 bp, Artificial Sequence
  Synthetic Probe
  modified_base (2)..(2): DNP phosphoramidite base
  misc_feature (2)..(2): n is a, c, g, or t
  modified_base (23)..(23): DNP phosphoramidite base
  misc_feature (23)..(23): n is a, c, g, or t
  modified_base (44)..(44): DNP phosphoramidite base
  misc_feature (44)..(44): n is a, c, g, or t
  modified_base (65)..(65): DNP phosphoramidite base
  misc_feature (65)..(65): n is a, c, g, or t
  modified_base (86)..(86): DNP phosphoramidite base
  misc_feature (86)..(86): n is a, c, g, or t
tnaccttaaaactttctcttgcnccttccgttgtgtttaatgancctttttcatctccttggttngagcccttacttttcttgttnt

SEQ ID NO: 617 - DNA, 87 bp, Artificial Sequence
  Synthetic Probe
  modified_base (2)..(2): DNP phosphoramidite base
  misc_feature (2)..(2): n is a, c, g, or t
  modified_base (23)..(23): DNP phosphoramidite base
  misc_feature (23)..(23): n is a, c, g, or t
  modified_base (44)..(44): DNP phosphoramidite base
  misc_feature (44)..(44): n is a, c, g, or t
  modified_base (65)..(65): DNP phosphoramidite base
  misc_feature (65)..(65): n is a, c, g, or t
  modified_base (86)..(86): DNP phosphoramidite base
  misc_feature (86)..(86): n is a, c, g, or t
tncttcagattgaagctgaaaanggctgaattacggtaggaaanaacgagggggtaggtgggaanagaaaatcttcctaaggtagnt

SEQ ID NO: 618 - DNA, 87 bp, Artificial Sequence
  Synthetic Probe
  modified_base (2)..(2): DNP phosphoramidite base
  misc_feature (2)..(2): n is a, c, g, or t
  modified_base (23)..(23): DNP phosphoramidite base
  misc_feature (23)..(23): n is a, c, g, or t
  modified_base (44)..(44): DNP phosphoramidite base
  misc_feature (44)..(44): n is a, c, g, or t
  modified_base (65)..(65): DNP phosphoramidite base
  misc_feature (65)..(65): n is a, c, g, or t
  modified_base (86)..(86): DNP phosphoramidite base
  misc_feature (86)..(86): n is a, c, g, or t
tnaaaaacagaaagtaaaaggtnttgatggagaagggactactntcaggaatgtgtgattgtttngtgcaaagacttagatatggnt

SEQ ID NO: 619 - DNA, 87 bp, Artificial Sequence
  Synthetic Probe
  modified_base (2)..(2): DNP phosphoramidite base
  misc_feature (2)..(2): n is a, c, g, or t
  modified_base (23)..(23): DNP phosphoramidite base
  misc_feature (23)..(23): n is a, c, g, or t
  modified_base (44)..(44): DNP phosphoramidite base
  misc_feature (44)..(44): n is a, c, g, or t
  modified_base (65)..(65): DNP phosphoramidite base
  misc_feature (65)..(65): n is a, c, g, or t
  modified_base (86)..(86): DNP phosphoramidite base
  misc_feature (86)..(86): n is a, c, g, or t
tntcatttgttaattcctaacancctggcacagcatatggccantagtagtagacattctgtaanatgactctcctagcatctaant

SEQ ID NO: 620 - DNA, 87 bp, Artificial Sequence
  Synthetic Probe
  modified_base (2)..(2): DNP phosphoramidite base
  misc_feature (2)..(2): n is a, c, g, or t
  modified_base (23)..(23): DNP phosphoramidite base
  misc_feature (23)..(23): n is a, c, g, or t
  modified_base (44)..(44): DNP phosphoramidite base
  misc_feature (44)..(44): n is a, c, g, or t
  modified_base (65)..(65): DNP phosphoramidite base
  misc_feature (65)..(65): n is a, c, g, or t
  modified_base (86)..(86): DNP phosphoramidite base
  misc_feature (86)..(86): n is a, c, g, or t
tnggtaaaggagctggaagtgcngaaaattgatgcatgtgaganggagatggaccctggtattanctatgagacaattgacaaggnt

SEQ ID NO: 621 - DNA, 87 bp, Artificial Sequence
  Synthetic Probe
  modified_base (2)..(2): DNP phosphoramidite base
  misc_feature (2)..(2): n is a, c, g, or t
  modified_base (23)..(23): DNP phosphoramidite base
  misc_feature (23)..(23): n is a, c, g, or t
  modified_base (44)..(44): DNP phosphoramidite base
  misc_feature (44)..(44): n is a, c, g, or t
  modified_base (65)..(65): DNP phosphoramidite base
  misc_feature (65)..(65): n is a, c, g, or t
  modified_base (86)..(86): DNP phosphoramidite base
  misc_feature (86)..(86): n is a, c, g, or t
tnttttagatttccctatgcaantctaattaccacctcataatntctgccaaaggatttgggagnaagggcatattttctctaaant

SEQ ID NO: 622 - DNA, 87 bp, Artificial Sequence
  Synthetic Probe
  modified_base (2)..(2): DNP phosphoramidite base
  misc_feature (2)..(2): n is a, c, g, or t
  modified_base (23)..(23): DNP phosphoramidite base
  misc_feature (23)..(23): n is a, c, g, or t
  modified_base (44)..(44): DNP phosphoramidite base
  misc_feature (44)..(44): n is a, c, g, or t
  modified_base (65)..(65): DNP phosphoramidite base
  misc_feature (65)..(65): n is a, c, g, or t
  modified_base (86)..(86): DNP phosphoramidite base
  misc_feature (86)..(86): n is a, c, g, or t
tntagcccaagggttactggaantgactgtgagctgtaacccgnaggatgcgtggagggaggggnaagaataccatattccaagtnt

SEQ ID NO: 623 - DNA, 87 bp, Artificial Sequence
  Synthetic Probe
  modified_base (2)..(2): DNP phosphoramidite base
  misc_feature (2)..(2): n is a, c, g, or t
  modified_base (23)..(23): DNP phosphoramidite base
  misc_feature (23)..(23): n is a, c, g, or t
  modified_base (44)..(44): DNP phosphoramidite base
  misc_feature (44)..(44): n is a, c, g, or t
  modified_base (65)..(65): DNP phosphoramidite base
  misc_feature (65)..(65): n is a, c, g, or t
  modified_base (86)..(86): DNP phosphoramidite base
  misc_feature (86)..(86): n is a, c, g, or t
tnttgaagttgtcttcaaagagncggactctcattccattctgncttctaattagctctttatantccttgctcatctggtatagnt

SEQ ID NO: 624 - DNA, 87 bp, Artificial Sequence
  Synthetic Probe
  modified_base (2)..(2): DNP phosphoramidite base
  misc_feature (2)..(2): n is a, c, g, or t
  modified_base (23)..(23): DNP phosphoramidite base
  misc_feature (23)..(23): n is a, c, g, or t
  modified_base (44)..(44): DNP phosphoramidite base
  misc_feature (44)..(44): n is a, c, g, or t
  modified_base (65)..(65): DNP phosphoramidite base
  misc_feature (65)..(65): n is a, c, g, or t
  modified_base (86)..(86): DNP phosphoramidite base
  misc_feature (86)..(86): n is a, c, g, or t
tnatccctgttactcaactaaanttatattggtatccttccttnccagtttccccttactgcaanacctttcaccatacttacccnt

SEQ ID NO: 625 - DNA, 87 bp, Artificial Sequence
  Synthetic Probe
  modified_base (2)..(2): DNP phosphoramidite base
  misc_feature (2)..(2): n is a, c, g, or t
  modified_base (23)..(23): DNP phosphoramidite base
  misc_feature (23)..(23): n is a, c, g, or t
  modified_base (44)..(44): DNP phosphoramidite base
  misc_feature (44)..(44): n is a, c, g, or t
  modified_base (65)..(65): DNP phosphoramidite base
  misc_feature (65)..(65): n is a, c, g, or t
  modified_base (86)..(86): DNP phosphoramidite base
  misc_feature (86)..(86): n is a, c, g, or t
tncccctacaagttctcacatcnactctggcccataaacttacntaagcaacttgctcttcccangaataagccacattgtcacant

SEQ ID NO: 626 - DNA, 87 bp, Artificial Sequence
  Synthetic Probe
  modified_base (2)..(2): DNP phosphoramidite base
  misc_feature (2)..(2): n is a, c, g, or t
  modified_base (23)..(23): DNP phosphoramidite base
  misc_feature (23)..(23): n is a, c, g, or t
  modified_base (44)..(44): DNP phosphoramidite base
  misc_feature (44)..(44): n is a, c, g, or t
  modified_base (65)..(65): DNP phosphoramidite base
  misc_feature (65)..(65): n is a, c, g, or t
  modified_base (86)..(86): DNP phosphoramidite base
  misc_feature (86)..(86): n is a, c, g, or t
tngactctcacttggtacctctngtcccctaagtgcccagtgcntttcttcctttcctttggaangtacataatttctttaacaant

SEQ ID NO: 627 - DNA, 87 bp, Artificial Sequence
  Synthetic Probe
  modified_base (2)..(2): DNP phosphoramidite base
  misc_feature (2)..(2): n is a, c, g, or t
  modified_base (23)..(23): DNP phosphoramidite base
  misc_feature (23)..(23): n is a, c, g, or t
  modified_base (44)..(44): DNP phosphoramidite base
  misc_feature (44)..(44): n is a, c, g, or t
  modified_base (65)..(65): DNP phosphoramidite base
  misc_feature (65)..(65): n is a, c, g, or t
  modified_base (86)..(86): DNP phosphoramidite base
  misc_feature (86)..(86): n is a, c, g, or t
tngagcaataccattctcaaaanagcatttcccattcagcacangaccttatacctttgctcagntattccagatcttggcaattnt

SEQ ID NO: 628 - DNA, 87 bp, Artificial Sequence
  Synthetic Probe
  modified_base (2)..(2): DNP phosphoramidite base
  misc_feature (2)..(2): n is a, c, g, or t
  modified_base (23)..(23): DNP phosphoramidite base
  misc_feature (23)..(23): n is a, c, g, or t
  modified_base (44)..(44): DNP phosphoramidite base
  misc_feature (44)..(44): n is a, c, g, or t
  modified_base (65)..(65): DNP phosphoramidite base
  misc_feature (65)..(65): n is a, c, g, or t
  modified_base (86)..(86): DNP phosphoramidite base
  misc_feature (86)..(86): n is a, c, g, or t
tncagattggaagagtaaccttntgatgatactgatgtggatanaaatacttggcccataggtanagcctgagaagggacaggcant

SEQ ID NO: 629 - DNA, 87 bp, Artificial Sequence
  Synthetic Probe
  modified_base (2)..(2): DNP phosphoramidite base
  misc_feature (2)..(2): n is a, c, g, or t
  modified_base (23)..(23): DNP phosphoramidite base
  misc_feature (23)..(23): n is a, c, g, or t
  modified_base (44)..(44): DNP phosphoramidite base
  misc_feature (44)..(44): n is a, c, g, or t
  modified_base (65)..(65): DNP phosphoramidite base
  misc_feature (65)..(65): n is a, c, g, or t
  modified_base (86)..(86): DNP phosphoramidite base
  misc_feature (86)..(86): n is a, c, g, or t
tnaagtccagaatgctggtgacnaggatttactgatgtgggctnttctgatccctgtggggatgngggggagtcctgggtggacant

SEQ ID NO: 630 - DNA, 87 bp, Artificial Sequence
  Synthetic Probe
  modified_base (2)..(2): DNP phosphoramidite base
  misc_feature (2)..(2): n is a, c, g, or t
  modified_base (23)..(23): DNP phosphoramidite base
  misc_feature (23)..(23): n is a, c, g, or t
  modified_base (44)..(44): DNP phosphoramidite base
  misc_feature (44)..(44): n is a, c, g, or t
  modified_base (65)..(65): DNP phosphoramidite base
  misc_feature (65)..(65): n is a, c, g, or t
  modified_base (86)..(86): DNP phosphoramidite base
  misc_feature (86)..(86): n is a, c, g, or t
tnttgtgggtggtagtgatttanctaccaggaggaaagccaggngtggttttgatattaggtagncggtctaaatgtgattagcant

SEQ ID NO: 631 - DNA, 87 bp, Artificial Sequence
  Synthetic Probe
  modified_base (2)..(2): DNP phosphoramidite base
  misc_feature (2)..(2): n is a, c, g, or t
  modified_base (23)..(23): DNP phosphoramidite base
  misc_feature (23)..(23): n is a, c, g, or t
  modified_base (44)..(44): DNP phosphoramidite base
  misc_feature (44)..(44): n is a, c, g, or t
  modified_base (65)..(65): DNP phosphoramidite base
  misc_feature (65)..(65): n is a, c, g, or t
  modified_base (86)..(86): DNP phosphoramidite base
  misc_feature (86)..(86): n is a, c, g, or t
tnggagtgcaagcagtgggcatnaccactaagatctcatatccncaccatccccaagctcagcanagcagaggtctaaatcgagcnt

SEQ ID NO: 632 - DNA, 87 bp, Artificial Sequence
  Synthetic Probe
  modified_base (2)..(2): DNP phosphoramidite base
  misc_feature (2)..(2): n is a, c, g, or t
  modified_base (23)..(23): DNP phosphoramidite base
  misc_feature (23)..(23): n is a, c, g, or t
  modified_base (44)..(44): DNP phosphoramidite base
  misc_feature (44)..(44): n is a, c, g, or t
  modified_base (65)..(65): DNP phosphoramidite base
  misc_feature (65)..(65): n is a, c, g, or t
  modified_base (86)..(86): DNP phosphoramidite base
  misc_feature (86)..(86): n is a, c, g, or t
tntatatgagcagtgtgaaactntcctcctgcccttctctgcangccactcctctagtgactgtngctctccaaatcttttacagnt

SEQ ID NO: 633 - DNA, 87 bp, Artificial Sequence
  Synthetic Probe
  modified_base (2)..(2): DNP phosphoramidite base
  misc_feature (2)..(2): n is a, c, g, or t
  modified_base (23)..(23): DNP phosphoramidite base
  misc_feature (23)..(23): n is a, c, g, or t
  modified_base (44)..(44): DNP phosphoramidite base
  misc_feature (44)..(44): n is a, c, g, or t
  modified_base (65)..(65): DNP phosphoramidite base
  misc_feature (65)..(65): n is a, c, g, or t
  modified_base (86)..(86): DNP phosphoramidite base
  misc_feature (86)..(86): n is a, c, g, or t
tnttggtttgccactgctcatcntggtgaaagcattttccccanttaggataagcaggtttgccnattacctgagggtatgcagcnt

SEQ ID NO: 634 - DNA, 87 bp, Artificial Sequence
  Synthetic Probe
  modified_base (2)..(2): DNP phosphoramidite base
  misc_feature (2)..(2): n is a, c, g, or t
  modified_base (23)..(23): DNP phosphoramidite base
  misc_feature (23)..(23): n is a, c, g, or t
  modified_base (44)..(44): DNP phosphoramidite base
  misc_feature (44)..(44): n is a, c, g, or t
  modified_base (65)..(65): DNP phosphoramidite base
  misc_feature (65)..(65): n is a, c, g, or t
  modified_base (86)..(86): DNP phosphoramidite base
  misc_feature (86)..(86): n is a, c, g, or t
tnggttaatattttattactgtngtccacactgagcttctctancctgaatggaggacaagactnccctgtgtgtgcatggaactnt

SEQ ID NO: 635 - DNA, 87 bp, Artificial Sequence
  Synthetic Probe
  modified_base (2)..(2): DNP phosphoramidite base
  misc_feature (2)..(2): n is a, c, g, or t
  modified_base (23)..(23): DNP phosphoramidite base
  misc_feature (23)..(23): n is a, c, g, or t
  modified_base (44)..(44): DNP phosphoramidite base
  misc_feature (44)..(44): n is a, c, g, or t
  modified_base (65)..(65): DNP phosphoramidite base
  misc_feature (65)..(65): n is a, c, g, or t
  modified_base (86)..(86): DNP phosphoramidite base
  misc_feature (86)..(86): n is a, c, g, or t
tnatgaggagcgatggtgctgtncagaagggcctgaaagacaantctgactacctctgtatcttnatgagtcaggctcctggaagnt

SEQ ID NO: 636 - DNA, 87 bp, Artificial Sequence
  Synthetic Probe
  modified_base (2)..(2): DNP phosphoramidite base
  misc_feature (2)..(2): n is a, c, g, or t
  modified_base (23)..(23): DNP phosphoramidite base
  misc_feature (23)..(23): n is a, c, g, or t
  modified_base (44)..(44): DNP phosphoramidite base
  misc_feature (44)..(44): n is a, c, g, or t
  modified_base (65)..(65): DNP phosphoramidite base
  misc_feature (65)..(65): n is a, c, g, or t
  modified_base (86)..(86): DNP phosphoramidite base
  misc_feature (86)..(86): n is a, c, g, or t
tnttatgagtacgcctccacagntgagtcttaccatatatggcntttgtaggatccctgcatgtntattggaagacatctgagatnt

SEQ ID NO: 637 - DNA, 87 bp, Artificial Sequence
  Synthetic Probe
  modified_base (2)..(2): DNP phosphoramidite base
  misc_feature (2)..(2): n is a, c, g, or t
  modified_base (23)..(23): DNP phosphoramidite base
  misc_feature (23)..(23): n is a, c, g, or t
  modified_base (44)..(44): DNP phosphoramidite base
  misc_feature (44)..(44): n is a, c, g, or t
  modified_base (65)..(65): DNP phosphoramidite base
  misc_feature (65)..(65): n is a, c, g, or t
  modified_base (86)..(86): DNP phosphoramidite base
  misc_feature (86)..(86): n is a, c, g, or t
tnatacttattgagtgcctgaanataaaaccatctaggctggcnaatattctacactgagtttcncataatgtgccccgccagaant

SEQ ID NO: 638 - DNA, 87 bp, Artificial Sequence
  Synthetic Probe
  modified_base (2)..(2): DNP phosphoramidite base
  misc_feature (2)..(2): n is a, c, g, or t
  modified_base (23)..(23): DNP phosphoramidite base
  misc_feature (23)..(23): n is a, c, g, or t
  modified_base (44)..(44): DNP phosphoramidite base
  misc_feature (44)..(44): n is a, c, g, or t
  modified_base (65)..(65): DNP phosphoramidite base
  misc_feature (65)..(65): n is a, c, g, or t
  modified_base (86)..(86): DNP phosphoramidite base
  misc_feature (86)..(86): n is a, c, g, or t
tnaggctttcagttcttctccancagagcctgactagtttcttngtgtattgctctagagacatncctaaagccaaacaagtgggnt

SEQ ID NO: 639 - DNA, 87 bp, Artificial Sequence
  Synthetic Probe
  modified_base (2)..(2): DNP phosphoramidite base
  misc_feature (2)..(2): n is a, c, g, or t
  modified_base (23)..(23): DNP phosphoramidite base
  misc_feature (23)..(23): n is a, c, g, or t
  modified_base (44)..(44): DNP phosphoramidite base
  misc_feature (44)..(44): n is a, c, g, or t
  modified_base (65)..(65): DNP phosphoramidite base
  misc_feature (65)..(65): n is a, c, g, or t
  modified_base (86)..(86): DNP phosphoramidite base
  misc_feature (86)..(86): n is a, c, g, or t
tnaaggtaataagctgatgaganctaaattcaaagcaaaagctncgctgagaggatctgcccaantgaggaagatgacagtagtgnt

SEQ ID NO: 640 - DNA, 87 bp, Artificial Sequence
  Synthetic Probe
  modified_base (2)..(2): DNP phosphoramidite base
  misc_feature (2)..(2): n is a, c, g, or t
  modified_base (23)..(23): DNP phosphoramidite base
  misc_feature (23)..(23): n is a, c, g, or t
  modified_base (44)..(44): DNP phosphoramidite base
  misc_feature (44)..(44): n is a, c, g, or t
  modified_base (65)..(65): DNP phosphoramidite base
  misc_feature (65)..(65): n is a, c, g, or t
  modified_base (86)..(86): DNP phosphoramidite base
  misc_feature (86)..(86): n is a, c, g, or t
tnagttataagaaagtgtggtgncgctcgaggcttgcttgaggngtatggaaatcttgagatagngtctggagaaccagggagagnt

SEQ ID NO: 641 - DNA, 87 bp, Artificial Sequence
  Synthetic Probe
  modified_base (2)..(2): DNP phosphoramidite base
  misc_feature (2)..(2): n is a, c, g, or t
  modified_base (23)..(23): DNP phosphoramidite base
  misc_feature (23)..(23): n is a, c, g, or t
  modified_base (44)..(44): DNP phosphoramidite base
  misc_feature (44)..(44): n is a, c, g, or t
  modified_base (65)..(65): DNP phosphoramidite base
  misc_feature (65)..(65): n is a, c, g, or t
  modified_base (86)..(86): DNP phosphoramidite base
  misc_feature (86)..(86): n is a, c, g, or t
tnattagcgttttggttcactantttctcgctatttctgcattntcattaactggcagggatcanctggatactctgtcatgaatnt

SEQ ID NO: 642 - DNA, 87 bp, Artificial Sequence
  Synthetic Probe
  modified_base (2)..(2): DNP phosphoramidite base
  misc_feature (2)..(2): n is a, c, g, or t
  modified_base (23)..(23): DNP phosphoramidite base
  misc_feature (23)..(23): n is a, c, g, or t
  modified_base (44)..(44): DNP phosphoramidite base
  misc_feature (44)..(44): n is a, c, g, or t
  modified_base (65)..(65): DNP phosphoramidite base
  misc_feature (65)..(65): n is a, c, g, or t
  modified_base (86)..(86): DNP phosphoramidite base
  misc_feature (86)..(86): n is a, c, g, or t
tngagaacctcaatgtcattganacccgtcttgtgggttttttnggagagaatgagagtatgctngggagacatgctctgcttgcnt

SEQ ID NO: 643 - DNA, 87 bp, Artificial Sequence
  Synthetic Probe
  modified_base (2)..(2): DNP phosphoramidite base
  misc_feature (2)..(2): n is a, c, g, or t
  modified_base (23)..(23): DNP phosphoramidite base
  misc_feature (23)..(23): n is a, c, g, or t
  modified_base (44)..(44): DNP phosphoramidite base
  misc_feature (44)..(44): n is a, c, g, or t
  modified_base (65)..(65): DNP phosphoramidite base
  misc_feature (65)..(65): n is a, c, g, or t
  modified_base (86)..(86): DNP phosphoramidite base
  misc_feature (86)..(86): n is a, c, g, or t
tncatcatttattttgaggaacntgatgatcaagacaggaatantgtatgcctgcctacaaaatncctcaaatcaggccactgaant

SEQ ID NO: 644 - DNA, 87 bp, Artificial Sequence
  Synthetic Probe
  modified_base (2)..(2): DNP phosphoramidite base
  misc_feature (2)..(2): n is a, c, g, or t
  modified_base (23)..(23): DNP phosphoramidite base
  misc_feature (23)..(23): n is a, c, g, or t
  modified_base (44)..(44): DNP phosphoramidite base
  misc_feature (44)..(44): n is a, c, g, or t
  modified_base (65)..(65): DNP phosphoramidite base
  misc_feature (65)..(65): n is a, c, g, or t
  modified_base (86)..(86): DNP phosphoramidite base
  misc_feature (86)..(86): n is a, c, g, or t
tnaatcacatagaagatactccnaaaggcagagaaaaatagaanagccttccgacgccctgaaanaaatcttgaccatccctgacnt

SEQ ID NO: 645 - DNA, 87 bp, Artificial Sequence
  Synthetic Probe
  modified_base (2)..(2): DNP phosphoramidite base
  misc_feature (2)..(2): n is a, c, g, or t
  modified_base (23)..(23): DNP phosphoramidite base
  misc_feature (23)..(23): n is a, c, g, or t
  modified_base (44)..(44): DNP phosphoramidite base
  misc_feature (44)..(44): n is a, c, g, or t
  modified_base (65)..(65): DNP phosphoramidite base
  misc_feature (65)..(65): n is a, c, g, or t
  modified_base (86)..(86): DNP phosphoramidite base
  misc_feature (86)..(86): n is a, c, g, or t
tnagtgcatggcgcaaatttagnatttaagcctcacgttagatnttcagatttgcacatcgagtncccgcccctatccaatccggnt

SEQ ID NO: 646 - DNA, 87 bp, Artificial Sequence
  Synthetic Probe
  modified_base (2)..(2): DNP phosphoramidite base
  misc_feature (2)..(2): n is a, c, g, or t
  modified_base (23)..(23): DNP phosphoramidite base
  misc_feature (23)..(23): n is a, c, g, or t
  modified_base (44)..(44): DNP phosphoramidite base
  misc_feature (44)..(44): n is a, c, g, or t
  modified_base (65)..(65): DNP phosphoramidite base
  misc_feature (65)..(65): n is a, c, g, or t
  modified_base (86)..(86): DNP phosphoramidite base
  misc_feature (86)..(86): n is a, c, g, or t
tncggtttttaaaacccccaatncctgctctttgtgttggcctncctcggagttgcccctctgcnaagccaacaattcgggatagnt

SEQ ID NO: 647 - DNA, 87 bp, Artificial Sequence
  Synthetic Probe
  modified_base (2)..(2): DNP phosphoramidite base
  misc_feature (2)..(2): n is a, c, g, or t
  modified_base (23)..(23): DNP phosphoramidite base
  misc_feature (23)..(23): n is a, c, g, or t
  modified_base (44)..(44): DNP phosphoramidite base
  misc_feature (44)..(44): n is a, c, g, or t
  modified_base (65)..(65): DNP phosphoramidite base
  misc_feature (65)..(65): n is a, c, g, or t
  modified_base (86)..(86): DNP phosphoramidite base
  misc_feature (86)..(86): n is a, c, g, or t
tngaccacttgctttgctcaggngatccccacttctggacaatntctgatttgctctctgagctntttcttccaccagttcccatnt

SEQ ID NO: 648 - DNA, 87 bp, Artificial Sequence
  Synthetic Probe
  modified_base (2)..(2): DNP phosphoramidite base
  misc_feature (2)..(2): n is a, c, g, or t
  modified_base (23)..(23): DNP phosphoramidite base
  misc_feature (23)..(23): n is a, c, g, or t
  modified_base (44)..(44): DNP phosphoramidite base
  misc_feature (44)..(44): n is a, c, g, or t
  modified_base (65)..(65): DNP phosphoramidite base
  misc_feature (65)..(65): n is a, c, g, or t
  modified_base (86)..(86): DNP phosphoramidite base
  misc_feature (86)..(86): n is a, c, g, or t
tnccaggttatttttatccaccncactttagatctcatatgtcnacccggcagatctcaatgcanttgggaggcgcatggattggnt

SEQ ID NO: 649 - DNA, 87 bp, Artificial Sequence
  Synthetic Probe
  modified_base (2)..(2): DNP phosphoramidite base
  misc_feature (2)..(2): n is a, c, g, or t
  modified_base (23)..(23): DNP phosphoramidite base
  misc_feature (23)..(23): n is a, c, g, or t
  modified_base (44)..(44): DNP phosphoramidite base
  misc_feature (44)..(44): n is a, c, g, or t
  modified_base (65)..(65): DNP phosphoramidite base
  misc_feature (65)..(65): n is a, c, g, or t
  modified_base (86)..(86): DNP phosphoramidite base
  misc_feature (86)..(86): n is a, c, g, or t
tntccaaatgagcggcaacattntccaaagtttcctttattatnctgtgggttgattttggctgngcttcaaagcacttttgctcnt

SEQ ID NO: 650 - DNA, 87 bp, Artificial Sequence
  Synthetic Probe
  modified_base (2)..(2): DNP phosphoramidite base
  misc_feature (2)..(2): n is a, c, g, or t
  modified_base (23)..(23): DNP phosphoramidite base
  misc_feature (23)..(23): n is a, c, g, or t
  modified_base (44)..(44): DNP phosphoramidite base
  misc_feature (44)..(44): n is a, c, g, or t
  modified_base (65)..(65): DNP phosphoramidite base
  misc_feature (65)..(65): n is a, c, g, or t
  modified_base (86)..(86): DNP phosphoramidite base
  misc_feature (86)..(86): n is a, c, g, or t
tnggagagggatgatggtcctanacttaagcaattgacagattngttacctccaggaagaagaanagtggcctaagttttttaggnt

SEQ ID NO: 651 - DNA, 87 bp, Artificial Sequence
  Synthetic Probe
  modified_base (2)..(2): DNP phosphoramidite base
  misc_feature (2)..(2): n is a, c, g, or t
  modified_base (23)..(23): DNP phosphoramidite base
  misc_feature (23)..(23): n is a, c, g, or t
  modified_base (44)..(44): DNP phosphoramidite base
  misc_feature (44)..(44): n is a, c, g, or t
  modified_base (65)..(65): DNP phosphoramidite base
  misc_feature (65)..(65): n is a, c, g, or t
  modified_base (86)..(86): DNP phosphoramidite base
  misc_feature (86)..(86): n is a, c, g, or t
tngttactattctagaaacatcntcgtccagtgtagactgatgnattgcaatcatatcacagcangttccttaggggagactgggnt

SEQ ID NO: 652 - DNA, 87 bp, Artificial Sequence
  Synthetic Probe
  modified_base (2)..(2): DNP phosphoramidite base
  misc_feature (2)..(2): n is a, c, g, or t
  modified_base (23)..(23): DNP phosphoramidite base
  misc_feature (23)..(23): n is a, c, g, or t
  modified_base (44)..(44): DNP phosphoramidite base
  misc_feature (44)..(44): n is a, c, g, or t
  modified_base (65)..(65): DNP phosphoramidite base
  misc_feature (65)..(65): n is a, c, g, or t
  modified_base (86)..(86): DNP phosphoramidite base
  misc_feature (86)..(86): n is a, c, g, or t
tncacgccagaaactttaatccnacaagtgccacgggatgtctntagggaaaaggccaaaaccangctgagtggaaaaaagaaatnt

SEQ ID NO: 653 - DNA, 87 bp, Artificial Sequence
  Synthetic Probe
  modified_base (2)..(2): DNP phosphoramidite base
  misc_feature (2)..(2): n is a, c, g, or t
  modified_base (23)..(23): DNP phosphoramidite base
  misc_feature (23)..(23): n is a, c, g, or t
  modified_base (44)..(44): DNP phosphoramidite base
  misc_feature (44)..(44): n is a, c, g, or t
  modified_base (65)..(65): DNP phosphoramidite base
  misc_feature (65)..(65): n is a, c, g, or t
  modified_base (86)..(86): DNP phosphoramidite base
  misc_feature (86)..(86): n is a, c, g, or t
tnacatttggcaagtagcaaganagtgaggtagaaccaagtagnagagtagatgatgggggcctntgaatctggaaaacatttgant

SEQ ID NO: 654 - DNA, 87 bp, Artificial Sequence
  Synthetic Probe
  modified_base (2)..(2): DNP phosphoramidite base
  misc_feature (2)..(2): n is a, c, g, or t
  modified_base (23)..(23): DNP phosphoramidite base
  misc_feature (23)..(23): n is a, c, g, or t
  modified_base (44)..(44): DNP phosphoramidite base
  misc_feature (44)..(44): n is a, c, g, or t
  modified_base (65)..(65): DNP phosphoramidite base
  misc_feature (65)..(65): n is a, c, g, or t
  modified_base (86)..(86): DNP phosphoramidite base
  misc_feature (86)..(86): n is a, c, g, or t
tnctattcttggtcatgtgattntaaagtggtgttggaggaagnattgtgaatcaacaaattcancagtgtacctaccatgtctant

SEQ ID NO: 655 - DNA, 87 bp, Artificial Sequence
  Synthetic Probe
  modified_base (2)..(2): DNP phosphoramidite base
  misc_feature (2)..(2): n is a, c, g, or t
  modified_base (23)..(23): DNP phosphoramidite base
  misc_feature (23)..(23): n is a, c, g, or t
  modified_base (44)..(44): DNP phosphoramidite base
  misc_feature (44)..(44): n is a, c, g, or t
  modified_base (65)..(65): DNP phosphoramidite base
  misc_feature (65)..(65): n is a, c, g, or t
  modified_base (86)..(86): DNP phosphoramidite base
  misc_feature (86)..(86): n is a, c, g, or t
tntcacctacctctttgatttcnatcctggacccaccctcccanccttgacgtgtaggttcaccntctccatggtttggttcattnt

SEQ ID NO: 656 - DNA, 87 bp, Artificial Sequence
  Synthetic Probe
  modified_base (2)..(2): DNP phosphoramidite base
  misc_feature (2)..(2): n is a, c, g, or t
  modified_base (23)..(23): DNP phosphoramidite base
  misc_feature (23)..(23): n is a, c, g, or t
  modified_base (44)..(44): DNP phosphoramidite base
  misc_feature (44)..(44): n is a, c, g, or t
  modified_base (65)..(65): DNP phosphoramidite base
  misc_feature (65)..(65): n is a, c, g, or t
  modified_base (86)..(86): DNP phosphoramidite base
  misc_feature (86)..(86): n is a, c, g, or t
tnatggagttacaggccctgcancatggtgaggataaaacatantgggaaatactgagaaagganatcatgggggattaccacatnt

SEQ ID NO: 657 - DNA, 87 bp, Artificial Sequence
  Synthetic Probe
  modified_base (2)..(2): DNP phosphoramidite base
  misc_feature (2)..(2): n is a, c, g, or t
  modified_base (23)..(23): DNP phosphoramidite base
  misc_feature (23)..(23): n is a, c, g, or t
  modified_base (44)..(44): DNP phosphoramidite base
  misc_feature (44)..(44): n is a, c, g, or t
  modified_base (65)..(65): DNP phosphoramidite base
  misc_feature (65)..(65): n is a, c, g, or t
  modified_base (86)..(86): DNP phosphoramidite base
  misc_feature (86)..(86): n is a, c, g, or t
tntgcttaagtggaggagggatngtcttggttcacacttctgcntcataagcctccctggaccangcatggaaatctcctctcatnt

SEQ ID NO: 658 - DNA, 87 bp, Artificial Sequence
  Synthetic Probe
  modified_base (2)..(2): DNP phosphoramidite base
  misc_feature (2)..(2): n is a, c, g, or t
  modified_base (23)..(23): DNP phosphoramidite base
  misc_feature (23)..(23): n is a, c, g, or t
  modified_base (44)..(44): DNP phosphoramidite base
  misc_feature (44)..(44): n is a, c, g, or t
  modified_base (65)..(65): DNP phosphoramidite base
  misc_feature (65)..(65): n is a, c, g, or t
  modified_base (86)..(86): DNP phosphoramidite base
  misc_feature (86)..(86): n is a, c, g, or t
tntcatttctatgagtgtacttntgtcctgtgtctcttcagttntccaggtggtcagttccagtngaggcgagtctctggcttgtnt

SEQ ID NO: 659 - DNA, 87 bp, Artificial Sequence
  Synthetic Probe
  modified_base (2)..(2): DNP phosphoramidite base
  misc_feature (2)..(2): n is a, c, g, or t
  modified_base (23)..(23): DNP phosphoramidite base
  misc_feature (23)..(23): n is a, c, g, or t
  modified_base (44)..(44): DNP phosphoramidite base
  misc_feature (44)..(44): n is a, c, g, or t
  modified_base (65)..(65): DNP phosphoramidite base
  misc_feature (65)..(65): n is a, c, g, or t
  modified_base (86)..(86): DNP phosphoramidite base
  misc_feature (86)..(86): n is a, c, g, or t
tngagtctgtgtcatgccgcacnagcggttctagtctgtcctcnatagttggctctcttgtgctnaattctgcccccctccccacnt

SEQ ID NO: 660 - DNA, 87 bp, Artificial Sequence
  Synthetic Probe
  modified_base (2)..(2): DNP phosphoramidite base
  misc_feature (2)..(2): n is a, c, g, or t
  modified_base (23)..(23): DNP phosphoramidite base
  misc_feature (23)..(23): n is a, c, g, or t
  modified_base (44)..(44): DNP phosphoramidite base
  misc_feature (44)..(44): n is a, c, g, or t
  modified_base (65)..(65): DNP phosphoramidite base
  misc_feature (65)..(65): n is a, c, g, or t
  modified_base (86)..(86): DNP phosphoramidite base
  misc_feature (86)..(86): n is a, c, g, or t
tncataaatggttgccccttacntcccacctcttcttcccttcntcgcattgggactgttttttnaagaaggagcttttttcccant

SEQ ID NO: 661 - DNA, 87 bp, Artificial Sequence
  Synthetic Probe
  modified_base (2)..(2): DNP phosphoramidite base
  misc_feature (2)..(2): n is a, c, g, or t
  modified_base (23)..(23): DNP phosphoramidite base
  misc_feature (23)..(23): n is a, c, g, or t
  modified_base (44)..(44): DNP phosphoramidite base
  misc_feature (44)..(44): n is a, c, g, or t
  modified_base (65)..(65): DNP phosphoramidite base
  misc_feature (65)..(65): n is a, c, g, or t
  modified_base (86)..(86): DNP phosphoramidite base
  misc_feature (86)..(86): n is a, c, g, or t
tntttttgaaagctctgagatgngctcggtgatattgagatgtncactgttggttctttgtcttncctgggagtctttggaaactnt

SEQ ID NO: 662 - DNA, 87 bp, Artificial Sequence
  Synthetic Probe
  modified_base (2)..(2): DNP phosphoramidite base
  misc_feature (2)..(2): n is a, c, g, or t
  modified_base (23)..(23): DNP phosphoramidite base
  misc_feature (23)..(23): n is a, c, g, or t
  modified_base (44)..(44): DNP phosphoramidite base
  misc_feature (44)..(44): n is a, c, g, or t
  modified_base (65)..(65): DNP phosphoramidite base
  misc_feature (65)..(65): n is a, c, g, or t
  modified_base (86)..(86): DNP phosphoramidite base
  misc_feature (86)..(86): n is a, c, g, or t
tnaaagttgtaccatttttagangctttggaatgtgagagatgnatgctgatcctgtcagaaagnactttttggaaaagttcatgnt

SEQ ID NO: 663 - DNA, 87 bp, Artificial Sequence
  Synthetic Probe
  modified_base (2)..(2): DNP phosphoramidite base
  misc_feature (2)..(2): n is a, c, g, or t
  modified_base (23)..(23): DNP phosphoramidite base
  misc_feature (23)..(23): n is a, c, g, or t
  modified_base (44)..(44): DNP phosphoramidite base
  misc_feature (44)..(44): n is a, c, g, or t
  modified_base (65)..(65): DNP phosphoramidite base
  misc_feature (65)..(65): n is a, c, g, or t
  modified_base (86)..(86): DNP phosphoramidite base
  misc_feature (86)..(86): n is a, c, g, or t
tntacatctctgtcatgggtggngatacagattgtggggatgtnggaatagctgaggtcttggangaattaaaaggaaaagagtant

SEQ ID NO: 664 - DNA, 87 bp, Artificial Sequence
  Synthetic Probe
  modified_base (2)..(2): DNP phosphoramidite base
  misc_feature (2)..(2): n is a, c, g, or t
  modified_base (23)..(23): DNP phosphoramidite base
  misc_feature (23)..(23): n is a, c, g, or t
  modified_base (44)..(44): DNP phosphoramidite base
  misc_feature (44)..(44): n is a, c, g, or t
  modified_base (65)..(65): DNP phosphoramidite base
  misc_feature (65)..(65): n is a, c, g, or t
  modified_base (86)..(86): DNP phosphoramidite base
  misc_feature (86)..(86): n is a, c, g, or t
tntctgtctggtctgttcagtanttgtggtgatcagttaggacntccccttgttcccaggcacangggaagatgtgaacaggaacnt

SEQ ID NO: 665 - DNA, 87 bp, Artificial Sequence
  Synthetic Probe
  modified_base (2)..(2): DNP phosphoramidite base
  misc_feature (2)..(2): n is a, c, g, or t
  modified_base (23)..(23): DNP phosphoramidite base
  misc_feature (23)..(23): n is a, c, g, or t
  modified_base (44)..(44): DNP phosphoramidite base
  misc_feature (44)..(44): n is a, c, g, or t
  modified_base (65)..(65): DNP phosphoramidite base
  misc_feature (65)..(65): n is a, c, g, or t
  modified_base (86)..(86): DNP phosphoramidite base
  misc_feature (86)..(86): n is a, c, g, or t
tngacaagaatttaatgaatctngaatacgcctctggacagagnatgttgcttgaggtgcaagantagtatgtgcctcatgtggtnt

SEQ ID NO: 666 - DNA, 87 bp, Artificial Sequence
  Synthetic Probe
  modified_base (2)..(2): DNP phosphoramidite base
  misc_feature (2)..(2): n is a, c, g, or t
  modified_base (23)..(23): DNP phosphoramidite base
  misc_feature (23)..(23): n is a, c, g, or t
  modified_base (44)..(44): DNP phosphoramidite base
  misc_feature (44)..(44): n is a, c, g, or t
  modified_base (65)..(65): DNP phosphoramidite base
  misc_feature (65)..(65): n is a, c, g, or t
  modified_base (86)..(86): DNP phosphoramidite base
  misc_feature (86)..(86): n is a, c, g, or t
tntgcagttggtattataggggntagagagggtgtaagtgggangggaaacagaggaccatggcnaggatctctatcgtagtggant

SEQ ID NO: 667 - DNA, 87 bp, Artificial Sequence
  Synthetic Probe
  modified_base (2)..(2): DNP phosphoramidite base
  misc_feature (2)..(2): n is a, c, g, or t
  modified_base (23)..(23): DNP phosphoramidite base
  misc_feature (23)..(23): n is a, c, g, or t
  modified_base (44)..(44): DNP phosphoramidite base
  misc_feature (44)..(44): n is a, c, g, or t
  modified_base (65)..(65): DNP phosphoramidite base
  misc_feature (65)..(65): n is a, c, g, or t
  modified_base (86)..(86): DNP phosphoramidite base
  misc_feature (86)..(86): n is a, c, g, or t
tnaatctagtagagttactggcngtggacaactggatggaatcncgaagagacagtgctttgganggggtaggggtggacaaaggnt

SEQ ID NO: 668 - DNA, 87 bp, Artificial Sequence
  Synthetic Probe
  modified_base (2)..(2): DNP phosphoramidite base
  misc_feature (2)..(2): n is a, c, g, or t
  modified_base (23)..(23): DNP phosphoramidite base
  misc_feature (23)..(23): n is a, c, g, or t
  modified_base (44)..(44): DNP phosphoramidite base
  misc_feature (44)..(44): n is a, c, g, or t
  modified_base (65)..(65): DNP phosphoramidite base
  misc_feature (65)..(65): n is a, c, g, or t
  modified_base (86)..(86): DNP phosphoramidite base
  misc_feature (86)..(86): n is a, c, g, or t
tnaattgtcttatggaagagaangattcctggggagactggaanggcaaggttgaatcctctgtngggatgtgaaagaggttggtnt

SEQ ID NO: 669 - DNA, 87 bp, Artificial Sequence
  Synthetic Probe
  modified_base (2)..(2): DNP phosphoramidite base
  misc_feature (2)..(2): n is a, c, g, or t
  modified_base (23)..(23): DNP phosphoramidite base
  misc_feature (23)..(23): n is a, c, g, or t
  modified_base (44)..(44): DNP phosphoramidite base
  misc_feature (44)..(44): n is a, c, g, or t
  modified_base (65)..(65): DNP phosphoramidite base
  misc_feature (65)..(65): n is a, c, g, or t
  modified_base (86)..(86): DNP phosphoramidite base
  misc_feature (86)..(86): n is a, c, g, or t
tncatttgtgtaaagctgctgangttgctcttttggaggtgccnatttggggcaggttctgccanttgagtgtccagcctgttctnt

SEQ ID NO: 670 - DNA, 87 bp, Artificial Sequence
  Synthetic Probe
  modified_base (2)..(2): DNP phosphoramidite base
  misc_feature (2)..(2): n is a, c, g, or t
  modified_base (23)..(23): DNP phosphoramidite base
  misc_feature (23)..(23): n is a, c, g, or t
  modified_base (44)..(44): DNP phosphoramidite base
  misc_feature (44)..(44): n is a, c, g, or t
  modified_base (65)..(65): DNP phosphoramidite base
  misc_feature (65)..(65): n is a, c, g, or t
  modified_base (86)..(86): DNP phosphoramidite base
  misc_feature (86)..(86): n is a, c, g, or t
tnctttctaggtccccagtttcnattgctggacaaaagctgatntagggcgagtaggctgtgagnagcctctaagtcttgcagctnt

SEQ ID NO: 671 - DNA, 87 bp, Artificial Sequence
  Synthetic Probe
  modified_base (2)..(2): DNP phosphoramidite base
  misc_feature (2)..(2): n is a, c, g, or t
  modified_base (23)..(23): DNP phosphoramidite base
  misc_feature (23)..(23): n is a, c, g, or t
  modified_base (44)..(44): DNP phosphoramidite base
  misc_feature (44)..(44): n is a, c, g, or t
  modified_base (65)..(65): DNP phosphoramidite base
  misc_feature (65)..(65): n is a, c, g, or t
  modified_base (86)..(86): DNP phosphoramidite base
  misc_feature (86)..(86): n is a, c, g, or t
tngtcagggagctgtcaatctgngagtggccacttcccaggganctccagctgtccttttgcatnttggggagtggagctggcaant

SEQ ID NO: 672 - DNA, 87 bp, Artificial Sequence
  Synthetic Probe
  modified_base (2)..(2): DNP phosphoramidite base
  misc_feature (2)..(2): n is a, c, g, or t
  modified_base (23)..(23): DNP phosphoramidite base
  misc_feature (23)..(23): n is a, c, g, or t
  modified_base (44)..(44): DNP phosphoramidite base
  misc_feature (44)..(44): n is a, c, g, or t
  modified_base (65)..(65): DNP phosphoramidite base
  misc_feature (65)..(65): n is a, c, g, or t
  modified_base (86)..(86): DNP phosphoramidite base
  misc_feature (86)..(86): n is a, c, g, or t
tnctgcccattcaacatatcttnattgctgtcctctctggaacntctcctctccctagctctcancttttaagctagtggatctgnt

SEQ ID NO: 673 - DNA, 87 bp, Artificial Sequence
  Synthetic Probe
  modified_base (2)..(2): DNP phosphoramidite base
  misc_feature (2)..(2): n is a, c, g, or t
  modified_base (23)..(23): DNP phosphoramidite base
  misc_feature (23)..(23): n is a, c, g, or t
  modified_base (44)..(44): DNP phosphoramidite base
  misc_feature (44)..(44): n is a, c, g, or t
  modified_base (65)..(65): DNP phosphoramidite base
  misc_feature (65)..(65): n is a, c, g, or t
  modified_base (86)..(86): DNP phosphoramidite base
  misc_feature (86)..(86): n is a, c, g, or t
tncttggggttgccgaagagagnacatcttttactcggtaattnctgcataaggctctccccaancagtgaaagcttttgctggcnt

SEQ ID NO: 674 - DNA, 87 bp, Artificial Sequence
  Synthetic Probe
  modified_base (2)..(2): DNP phosphoramidite base
  misc_feature (2)..(2): n is a, c, g, or t
  modified_base (23)..(23): DNP phosphoramidite base
  misc_feature (23)..(23): n is a, c, g, or t
  modified_base (44)..(44): DNP phosphoramidite base
  misc_feature (44)..(44): n is a, c, g, or t
  modified_base (65)..(65): DNP phosphoramidite base
  misc_feature (65)..(65): n is a, c, g, or t
  modified_base (86)..(86): DNP phosphoramidite base
  misc_feature (86)..(86): n is a, c, g, or t
tnttgtatgtgtaagccgggaanctgctgcaggtgctcagttgnagtgtgttcgtatgccgatgngtttccatgttccccatttgnt

SEQ ID NO: 675 - DNA, 87 bp, Artificial Sequence
  Synthetic Probe
  modified_base (2)..(2): DNP phosphoramidite base
  misc_feature (2)..(2): n is a, c, g, or t
  modified_base (23)..(23): DNP phosphoramidite base
  misc_feature (23)..(23): n is a, c, g, or t
  modified_base (44)..(44): DNP phosphoramidite base
  misc_feature (44)..(44): n is a, c, g, or t
  modified_base (65)..(65): DNP phosphoramidite base
  misc_feature (65)..(65): n is a, c, g, or t
  modified_base (86)..(86): DNP phosphoramidite base
  misc_feature (86)..(86): n is a, c, g, or t
tnagtaagtttatagtgtagtcnaaaacttagttgttcagcctnctgcctttagctgtgcagganccaggctgtacagctctaatnt

SEQ ID NO: 676 - DNA, 87 bp, Artificial Sequence
  Synthetic Probe
  modified_base (2)..(2): DNP phosphoramidite base
  misc_feature (2)..(2): n is a, c, g, or t
  modified_base (23)..(23): DNP phosphoramidite base
  misc_feature (23)..(23): n is a, c, g, or t
  modified_base (44)..(44): DNP phosphoramidite base
  misc_feature (44)..(44): n is a, c, g, or t
  modified_base (65)..(65): DNP phosphoramidite base
  misc_feature (65)..(65): n is a, c, g, or t
  modified_base (86)..(86): DNP phosphoramidite base
  misc_feature (86)..(86): n is a, c, g, or t
tnatttcatggccacagatgttnttatcagtgtttagcagtaanggcctatactctcctgggatntacatgcgtttgttctttccnt

SEQ ID NO: 677 - DNA, 87 bp, Artificial Sequence
  Synthetic Probe
  modified_base (2)..(2): DNP phosphoramidite base
  misc_feature (2)..(2): n is a, c, g, or t
  modified_base (23)..(23): DNP phosphoramidite base
  misc_feature (23)..(23): n is a, c, g, or t
  modified_base (44)..(44): DNP phosphoramidite base
  misc_feature (44)..(44): n is a, c, g, or t
  modified_base (65)..(65): DNP phosphoramidite base
  misc_feature (65)..(65): n is a, c, g, or t
  modified_base (86)..(86): DNP phosphoramidite base
  misc_feature (86)..(86): n is a, c, g, or t
tntcctatcttctgatagtgctnttttctccattatatttcccnccttctgtgtgcttgctgccncttgatctggaatcttgtttnt

SEQ ID NO: 678 - DNA, 87 bp, Artificial Sequence
  Synthetic Probe
  modified_base (2)..(2): DNP phosphoramidite base
  misc_feature (2)..(2): n is a, c, g, or t
  modified_base (23)..(23): DNP phosphoramidite base
  misc_feature (23)..(23): n is a, c, g, or t
  modified_base (44)..(44): DNP phosphoramidite base
  misc_feature (44)..(44): n is a, c, g, or t
  modified_base (65)..(65): DNP phosphoramidite base
  misc_feature (65)..(65): n is a, c, g, or t
  modified_base (86)..(86): DNP phosphoramidite base
  misc_feature (86)..(86): n is a, c, g, or t
tnttcggacatggaagtacctgnagaggttgaattaataggtanggtggtggcttgatgaaagcnaaaagttgggcagagacaggnt

SEQ ID NO: 679 - DNA, 87 bp, Artificial Sequence
  Synthetic Probe
  modified_base (2)..(2): DNP phosphoramidite base
  misc_feature (2)..(2): n is a, c, g, or t
  modified_base (23)..(23): DNP phosphoramidite base
  misc_feature (23)..(23): n is a, c, g, or t
  modified_base (44)..(44): DNP phosphoramidite base
  misc_feature (44)..(44): n is a, c, g, or t
  modified_base (65)..(65): DNP phosphoramidite base
  misc_feature (65)..(65): n is a, c, g, or t
  modified_base (86)..(86): DNP phosphoramidite base
  misc_feature (86)..(86): n is a, c, g, or t
tngtaatgaatcagaaccattanggagttgtcctcacttccacnccttttccacatgcctctacnatctaatccacctcctgggcnt

SEQ ID NO: 680 - DNA, 87 bp, Artificial Sequence
  Synthetic Probe
  modified_base (2)..(2): DNP phosphoramidite base
  misc_feature (2)..(2): n is a, c, g, or t
  modified_base (23)..(23): DNP phosphoramidite base
  misc_feature (23)..(23): n is a, c, g, or t
  modified_base (44)..(44): DNP phosphoramidite base
  misc_feature (44)..(44): n is a, c, g, or t
  modified_base (65)..(65): DNP phosphoramidite base
  misc_feature (65)..(65): n is a, c, g, or t
  modified_base (86)..(86): DNP phosphoramidite base
  misc_feature (86)..(86): n is a, c, g, or t
tnacaaccctgtcccccatctgntataaagaccccaatcctcanggctcctcttatcactgctgngaaattatcttcgatgtctcnt

SEQ ID NO: 681 - DNA, 87 bp, Artificial Sequence
  Synthetic Probe
  modified_base (2)..(2): DNP phosphoramidite base
  misc_feature (2)..(2): n is a, c, g, or t
  modified_base (23)..(23): DNP phosphoramidite base
  misc_feature (23)..(23): n is a, c, g, or t
  modified_base (44)..(44): DNP phosphoramidite base
  misc_feature (44)..(44): n is a, c, g, or t
  modified_base (65)..(65): DNP phosphoramidite base
  misc_feature (65)..(65): n is a, c, g, or t
  modified_base (86)..(86): DNP phosphoramidite base
  misc_feature (86)..(86): n is a, c, g, or t
tnttccttctgccgctcaccccncatggccttcttttgcctctnagagaagacatcacggcctcnactctcacggcttcttttccnt

SEQ ID NO: 682 - DNA, 87 bp, Artificial Sequence
  Synthetic Probe
  modified_base (2)..(2): DNP phosphoramidite base
  misc_feature (2)..(2): n is a, c, g, or t
  modified_base (23)..(23): DNP phosphoramidite base
  misc_feature (23)..(23): n is a, c, g, or t
  modified_base (44)..(44): DNP phosphoramidite base
  misc_feature (44)..(44): n is a, c, g, or t
  modified_base (65)..(65): DNP phosphoramidite base
  misc_feature (65)..(65): n is a, c, g, or t
  modified_base (86)..(86): DNP phosphoramidite base
  misc_feature (86)..(86): n is a, c, g, or t
tnacatgagtgggagccaactangagtacagtgttcccgattangtttcatttttcccagttgtnaatcacagtctcatttgcctnt

SEQ ID NO: 683 - DNA, 87 bp, Artificial Sequence
  Synthetic Probe
  modified_base (2)..(2): DNP phosphoramidite base
  misc_feature (2)..(2): n is a, c, g, or t
  modified_base (23)..(23): DNP phosphoramidite base
  misc_feature (23)..(23): n is a, c, g, or t
  modified_base (44)..(44): DNP phosphoramidite base
  misc_feature (44)..(44): n is a, c, g, or t
  modified_base (65)..(65): DNP phosphoramidite base
  misc_feature (65)..(65): n is a, c, g, or t
  modified_base (86)..(86): DNP phosphoramidite base
  misc_feature (86)..(86): n is a, c, g, or t
tnaccgtcttcccgcggtgttangtatgtgatttgtcctggcgntggatttgttgtgactccatnctacctacatcatgtttctcnt

SEQ ID NO: 684 - DNA, 87 bp, Artificial Sequence
  Synthetic Probe
  modified_base (2)..(2): DNP phosphoramidite base
  misc_feature (2)..(2): n is a, c, g, or t
  modified_base (23)..(23): DNP phosphoramidite base
  misc_feature (23)..(23): n is a, c, g, or t
  modified_base (44)..(44): DNP phosphoramidite base
  misc_feature (44)..(44): n is a, c, g, or t
  modified_base (65)..(65): DNP phosphoramidite base
  misc_feature (65)..(65): n is a, c, g, or t
  modified_base (86)..(86): DNP phosphoramidite base
  misc_feature (86)..(86): n is a, c, g, or t
tntgaccgcttgttttccacagngagacactgttctgtagttantaaaaacaagtgttacgcagncgactgtttcctgagcgcgtnt

SEQ ID NO: 685 - DNA, 87 bp, Artificial Sequence
  Synthetic Probe
  modified_base (2)..(2): DNP phosphoramidite base
  misc_feature (2)..(2): n is a, c, g, or t
  modified_base (23)..(23): DNP phosphoramidite base
  misc_feature (23)..(23): n is a, c, g, or t
  modified_base (44)..(44): DNP phosphoramidite base
  misc_feature (44)..(44): n is a, c, g, or t
  modified_base (65)..(65): DNP phosphoramidite base
  misc_feature (65)..(65): n is a, c, g, or t
  modified_base (86)..(86): DNP phosphoramidite base
  misc_feature (86)..(86): n is a, c, g, or t
tngatcattagaatcctatttangcttaggattgtgcacagaanctgcacattggtcattctggngctgggtgtcctctgagcacnt

SEQ ID NO: 686 - DNA, 87 bp, Artificial Sequence
  Synthetic Probe
  modified_base (2)..(2): DNP phosphoramidite base
  misc_feature (2)..(2): n is a, c, g, or t
  modified_base (23)..(23): DNP phosphoramidite base
  misc_feature (23)..(23): n is a, c, g, or t
  modified_base (44)..(44): DNP phosphoramidite base
  misc_feature (44)..(44): n is a, c, g, or t
  modified_base (65)..(65): DNP phosphoramidite base
  misc_feature (65)..(65): n is a, c, g, or t
  modified_base (86)..(86): DNP phosphoramidite base
  misc_feature (86)..(86): n is a, c, g, or t
tnctggggcagtagggttcaagntgtccaggctgctaagagtgnacttcagccaaacaaacctgnaaaagctagaatttctgctgnt

SEQ ID NO: 687 - DNA, 87 bp, Artificial Sequence
  Synthetic Probe
  modified_base (2)..(2): DNP phosphoramidite base
  misc_feature (2)..(2): n is a, c, g, or t
  modified_base (23)..(23): DNP phosphoramidite base
  misc_feature (23)..(23): n is a, c, g, or t
  modified_base (44)..(44): DNP phosphoramidite base
  misc_feature (44)..(44): n is a, c, g, or t
  modified_base (65)..(65): DNP phosphoramidite base
  misc_feature (65)..(65): n is a, c, g, or t
  modified_base (86)..(86): DNP phosphoramidite base
  misc_feature (86)..(86): n is a, c, g, or t
tntgtgaaggctgcaggcctganccttgtgtcctgaaagtcttnttagataatgctttcctggcngggtgagacactcttagactnt

SEQ ID NO: 688 - DNA, 87 bp, Artificial Sequence
  Synthetic Probe
  modified_base (2)..(2): DNP phosphoramidite base
  misc_feature (2)..(2): n is a, c, g, or t
  modified_base (23)..(23): DNP phosphoramidite base
  misc_feature (23)..(23): n is a, c, g, or t
  modified_base (44)..(44): DNP phosphoramidite base
  misc_feature (44)..(44): n is a, c, g, or t
  modified_base (65)..(65): DNP phosphoramidite base
  misc_feature (65)..(65): n is a, c, g, or t
  modified_base (86)..(86): DNP phosphoramidite base
  misc_feature (86)..(86): n is a, c, g, or t
tngtcactgtttttttgctctcntagaaaggctgagccgatttnatattgtaggagaggatatancgggttttctctgtggcttcnt

SEQ ID NO: 689 - DNA, 87 bp, Artificial Sequence
  Synthetic Probe
  modified_base (2)..(2): DNP phosphoramidite base
  misc_feature (2)..(2): n is a, c, g, or t
  modified_base (23)..(23): DNP phosphoramidite base
  misc_feature (23)..(23): n is a, c, g, or t
  modified_base (44)..(44): DNP phosphoramidite base
  misc_feature (44)..(44): n is a, c, g, or t
  modified_base (65)..(65): DNP phosphoramidite base
  misc_feature (65)..(65): n is a, c, g, or t
  modified_base (86)..(86): DNP phosphoramidite base
  misc_feature (86)..(86): n is a, c, g, or t
tncatttcactgtcatcttgaancctggcctgattgcttggctngcccttttgtccacatggagngcatgcgctttaccatgcttnt

SEQ ID NO: 690 - DNA, 87 bp, Artificial Sequence
  Synthetic Probe
  modified_base (2)..(2): DNP phosphoramidite base
  misc_feature (2)..(2): n is a, c, g, or t
  modified_base (23)..(23): DNP phosphoramidite base
  misc_feature (23)..(23): n is a, c, g, or t
  modified_base (44)..(44): DNP phosphoramidite base
  misc_feature (44)..(44): n is a, c, g, or t
  modified_base (65)..(65): DNP phosphoramidite base
  misc_feature (65)..(65): n is a, c, g, or t
  modified_base (86)..(86): DNP phosphoramidite base
  misc_feature (86)..(86): n is a, c, g, or t
tngttgagggtttgaaactgtgnagtcaagaagcttagcttganttgtgggctgtataccattcntctgtgctttggtcacaaggnt

SEQ ID NO: 691 - DNA, 87 bp, Artificial Sequence
  Synthetic Probe
  modified_base (2)..(2): DNP phosphoramidite base
  misc_feature (2)..(2): n is a, c, g, or t
  modified_base (23)..(23): DNP phosphoramidite base
  misc_feature (23)..(23): n is a, c, g, or t
  modified_base (44)..(44): DNP phosphoramidite base
  misc_feature (44)..(44): n is a, c, g, or t
  modified_base (65)..(65): DNP phosphoramidite base
  misc_feature (65)..(65): n is a, c, g, or t
  modified_base (86)..(86): DNP phosphoramidite base
  misc_feature (86)..(86): n is a, c, g, or t
tnacatagactttttatcagganttgaaagaagctgttgggagncagaggccatcgggtgctganctctgtatgtgaaagacagtnt

SEQ ID NO: 692 - DNA, 87 bp, Artificial Sequence
  Synthetic Probe
  modified_base (2)..(2): DNP phosphoramidite base
  misc_feature (2)..(2): n is a, c, g, or t
  modified_base (23)..(23): DNP phosphoramidite base
  misc_feature (23)..(23): n is a, c, g, or t
  modified_base (44)..(44): DNP phosphoramidite base
  misc_feature (44)..(44): n is a, c, g, or t
  modified_base (65)..(65): DNP phosphoramidite base
  misc_feature (65)..(65): n is a, c, g, or t
  modified_base (86)..(86): DNP phosphoramidite base
  misc_feature (86)..(86): n is a, c, g, or t
tntttaagaactactggtgaatngtattgggcagtgcctccctngtcagcactggccatgtaaanggggcacacactacctctgtnt

SEQ ID NO: 693 - DNA, 87 bp, Artificial Sequence
  Synthetic Probe
  modified_base (2)..(2): DNP phosphoramidite base
  misc_feature (2)..(2): n is a, c, g, or t
  modified_base (23)..(23): DNP phosphoramidite base
  misc_feature (23)..(23): n is a, c, g, or t
  modified_base (44)..(44): DNP phosphoramidite base
  misc_feature (44)..(44): n is a, c, g, or t
  modified_base (65)..(65): DNP phosphoramidite base
  misc_feature (65)..(65): n is a, c, g, or t
  modified_base (86)..(86): DNP phosphoramidite base
  misc_feature (86)..(86): n is a, c, g, or t
tncctagtgtttttttctgacangattaatatttgttactcccnagcctatgtggctgtcagacntcacttattcttcctcctgcnt

SEQ ID NO: 694 - DNA, 87 bp, Artificial Sequence
  Synthetic Probe
  modified_base (2)..(2): DNP phosphoramidite base
  misc_feature (2)..(2): n is a, c, g, or t
  modified_base (23)..(23): DNP phosphoramidite base
  misc_feature (23)..(23): n is a, c, g, or t
  modified_base (44)..(44): DNP phosphoramidite base
  misc_feature (44)..(44): n is a, c, g, or t
  modified_base (65)..(65): DNP phosphoramidite base
  misc_feature (65)..(65): n is a, c, g, or t
  modified_base (86)..(86): DNP phosphoramidite base
  misc_feature (86)..(86): n is a, c, g, or t
tnatctttctcttcctttgctcntattgtcagacaagcatgttntatttcctagagcctctgagngtgagaacctcactgtgaacnt

SEQ ID NO: 695 - DNA, 87 bp, Artificial Sequence
  Synthetic Probe
  modified_base (2)..(2): DNP phosphoramidite base
  misc_feature (2)..(2): n is a, c, g, or t
  modified_base (23)..(23): DNP phosphoramidite base
  misc_feature (23)..(23): n is a, c, g, or t
  modified_base (44)..(44): DNP phosphoramidite base
  misc_feature (44)..(44): n is a, c, g, or t
  modified_base (65)..(65): DNP phosphoramidite base
  misc_feature (65)..(65): n is a, c, g, or t
  modified_base (86)..(86): DNP phosphoramidite base
  misc_feature (86)..(86): n is a, c, g, or t
tntgaaagacattttcgaaaaanctggacagagtgtatacatgncacctgaaaagacatgtgcgnagaggtgagagcggcactttnt

SEQ ID NO: 696 - DNA, 87 bp, Artificial Sequence
  Synthetic Probe
  modified_base (2)..(2): DNP phosphoramidite base
  misc_feature (2)..(2): n is a, c, g, or t
  modified_base (23)..(23): DNP phosphoramidite base
  misc_feature (23)..(23): n is a, c, g, or t
  modified_base (44)..(44): DNP phosphoramidite base
  misc_feature (44)..(44): n is a, c, g, or t
  modified_base (65)..(65): DNP phosphoramidite base
  misc_feature (65)..(65): n is a, c, g, or t
  modified_base (86)..(86): DNP phosphoramidite base
  misc_feature (86)..(86): n is a, c, g, or t
tnctgccttcactcttacctcantcaatagctaatccatccaanaacaccacttccatatgaatncttcctataacatgcctccant

SEQ ID NO: 697 - DNA, 87 bp, Artificial Sequence
  Synthetic Probe
  modified_base (2)..(2): DNP phosphoramidite base
  misc_feature (2)..(2): n is a, c, g, or t
  modified_base (23)..(23): DNP phosphoramidite base
  misc_feature (23)..(23): n is a, c, g, or t
  modified_base (44)..(44): DNP phosphoramidite base
  misc_feature (44)..(44): n is a, c, g, or t
  modified_base (65)..(65): DNP phosphoramidite base
  misc_feature (65)..(65): n is a, c, g, or t
  modified_base (86)..(86): DNP phosphoramidite base
  misc_feature (86)..(86): n is a, c, g, or t
tnatttttacctcggcaataaangttgggtgcaaacgccttagncctccataaactgagactacnctaactttcaaatttcctttnt

SEQ ID NO: 698 - DNA, 87 bp, Artificial Sequence
  Synthetic Probe
  modified_base (2)..(2): DNP phosphoramidite base
  misc_feature (2)..(2): n is a, c, g, or t
  modified_base (23)..(23): DNP phosphoramidite base
  misc_feature (23)..(23): n is a, c, g, or t
  modified_base (44)..(44): DNP phosphoramidite base
  misc_feature (44)..(44): n is a, c, g, or t
  modified_base (65)..(65): DNP phosphoramidite base
  misc_feature (65)..(65): n is a, c, g, or t
  modified_base (86)..(86): DNP phosphoramidite base
  misc_feature (86)..(86): n is a, c, g, or t
tnaaggtttccactcactttttnaaaattagaaaccaattgctntaaaagggatttagtaatctncacgatgcctcagggcatccnt

SEQ ID NO: 699 - DNA, 87 bp, Artificial Sequence
  Synthetic Probe
  modified_base (2)..(2): DNP phosphoramidite base
  misc_feature (2)..(2): n is a, c, g, or t
  modified_base (23)..(23): DNP phosphoramidite base
  misc_feature (23)..(23): n is a, c, g, or t
  modified_base (44)..(44): DNP phosphoramidite base
  misc_feature (44)..(44): n is a, c, g, or t
  modified_base (65)..(65): DNP phosphoramidite base
  misc_feature (65)..(65): n is a, c, g, or t
  modified_base (86)..(86): DNP phosphoramidite base
  misc_feature (86)..(86): n is a, c, g, or t
tncaggtaatgaaacaatagagntaactggcatgttagagaacnagaacatttgttgaaaatatntctgcacacaatgcaacgctnt

SEQ ID NO: 700 - DNA, 87 bp, Artificial Sequence
  Synthetic Probe
  modified_base (2)..(2): DNP phosphoramidite base
  misc_feature (2)..(2): n is a, c, g, or t
  modified_base (23)..(23): DNP phosphoramidite base
  misc_feature (23)..(23): n is a, c, g, or t
  modified_base (44)..(44): DNP phosphoramidite base
  misc_feature (44)..(44): n is a, c, g, or t
  modified_base (65)..(65): DNP phosphoramidite base
  misc_feature (65)..(65): n is a, c, g, or t
  modified_base (86)..(86): DNP phosphoramidite base
  misc_feature (86)..(86): n is a, c, g, or t
tnttaacaccaatgtagaaatanatgttcacagtaccttgtagngtactgaacatggaaaggtcncctgtcacaaaccaaactctnt

SEQ ID NO: 701 - DNA, 87 bp, Artificial Sequence
  Synthetic Probe
  modified_base (2)..(2): DNP phosphoramidite base
  misc_feature (2)..(2): n is a, c, g, or t
  modified_base (23)..(23): DNP phosphoramidite base
  misc_feature (23)..(23): n is a, c, g, or t
  modified_base (44)..(44): DNP phosphoramidite base
  misc_feature (44)..(44): n is a, c, g, or t
  modified_base (65)..(65): DNP phosphoramidite base
  misc_feature (65)..(65): n is a, c, g, or t
  modified_base (86)..(86): DNP phosphoramidite base
  misc_feature (86)..(86): n is a, c, g, or t
tnctctgtagagtattcaaagcncacttcacttttgccagaaantatacccccaaaagactatgngaaactcaagatctacaagtnt

SEQ ID NO: 702 - DNA, 87 bp, Artificial Sequence
  Synthetic Probe
  modified_base (2)..(2): DNP phosphoramidite base
  misc_feature (2)..(2): n is a, c, g, or t
  modified_base (23)..(23): DNP phosphoramidite base
  misc_feature (23)..(23): n is a, c, g, or t
  modified_base (44)..(44): DNP phosphoramidite base
  misc_feature (44)..(44): n is a, c, g, or t
  modified_base (65)..(65): DNP phosphoramidite base
  misc_feature (65)..(65): n is a, c, g, or t
  modified_base (86)..(86): DNP phosphoramidite base
  misc_feature (86)..(86): n is a, c, g, or t
tnttcaaataggacctctaactnctagagaactaactgcaaacntttaagatgtaaaaagactancttttttgtgtatgaaaacant

SEQ ID NO: 703 - DNA, 87 bp, Artificial Sequence
  Synthetic Probe
  modified_base (2)..(2): DNP phosphoramidite base
  misc_feature (2)..(2): n is a, c, g, or t
  modified_base (23)..(23): DNP phosphoramidite base
  misc_feature (23)..(23): n is a, c, g, or t
  modified_base (44)..(44): DNP phosphoramidite base
  misc_feature (44)..(44): n is a, c, g, or t
  modified_base (65)..(65): DNP phosphoramidite base
  misc_feature (65)..(65): n is a, c, g, or t
  modified_base (86)..(86): DNP phosphoramidite base
  misc_feature (86)..(86): n is a, c, g, or t
tnggtccaatagcttctcactgngagagaaggaaaatgtcagtngcactaaagcagaaaatgagnagatgatcctaaaattgggant

SEQ ID NO: 704 - DNA, 87 bp, Artificial Sequence
  Synthetic Probe
  modified_base (2)..(2): DNP phosphoramidite base
  misc_feature (2)..(2): n is a, c, g, or t
  modified_base (23)..(23): DNP phosphoramidite base
  misc_feature (23)..(23): n is a, c, g, or t
  modified_base (44)..(44): DNP phosphoramidite base
  misc_feature (44)..(44): n is a, c, g, or t
  modified_base (65)..(65): DNP phosphoramidite base
  misc_feature (65)..(65): n is a, c, g, or t
  modified_base (86)..(86): DNP phosphoramidite base
  misc_feature (86)..(86): n is a, c, g, or t
tnttctgaacacatcccccgcangaattttatctctgttctccntttaatttaactcgattgtgncattattgtcagaacatatcnt

SEQ ID NO: 705 - DNA, 87 bp, Artificial Sequence
  Synthetic Probe
  modified_base (2)..(2): DNP phosphoramidite base
  misc_feature (2)..(2): n is a, c, g, or t
  modified_base (23)..(23): DNP phosphoramidite base
  misc_feature (23)..(23): n is a, c, g, or t
  modified_base (44)..(44): DNP phosphoramidite base
  misc_feature (44)..(44): n is a, c, g, or t
  modified_base (65)..(65): DNP phosphoramidite base
  misc_feature (65)..(65): n is a, c, g, or t
  modified_base (86)..(86): DNP phosphoramidite base
  misc_feature (86)..(86): n is a, c, g, or t
tnaatctcatctgataaattatnattttaactaggtcattacancactgttgaagaagatttgcncattctgctttagccacattnt

SEQ ID NO: 706 - DNA, 87 bp, Artificial Sequence
  Synthetic Probe
  modified_base (2)..(2): DNP phosphoramidite base
  misc_feature (2)..(2): n is a, c, g, or t
  modified_base (23)..(23): DNP phosphoramidite base
  misc_feature (23)..(23): n is a, c, g, or t
  modified_base (44)..(44): DNP phosphoramidite base
  misc_feature (44)..(44): n is a, c, g, or t
  modified_base (65)..(65): DNP phosphoramidite base
  misc_feature (65)..(65): n is a, c, g, or t
  modified_base (86)..(86): DNP phosphoramidite base
  misc_feature (86)..(86): n is a, c, g, or t
tnatacactataaagacttcagnatcataatctaagcaaataantccttacccaaacaagaagangagcatcatcactgagccacnt

SEQ ID NO: 707 - DNA, 87 bp, Artificial Sequence
  Synthetic Probe
  modified_base (2)..(2): DNP phosphoramidite base
  misc_feature (2)..(2): n is a, c, g, or t
  modified_base (23)..(23): DNP phosphoramidite base
  misc_feature (23)..(23): n is a, c, g, or t
  modified_base (44)..(44): DNP phosphoramidite base
  misc_feature (44)..(44): n is a, c, g, or t
  modified_base (65)..(65): DNP phosphoramidite base
  misc_feature (65)..(65): n is a, c, g, or t
  modified_base (86)..(86): DNP phosphoramidite base
  misc_feature (86)..(86): n is a, c, g, or t
tnttctcaaagtctcatagtaanaagagaaaagtagaattgccntaaacctgtatttttacaganataaaggaagagttcaaaatnt

SEQ ID NO: 708 - DNA, 87 bp, Artificial Sequence
  Synthetic Probe
  modified_base (2)..(2): DNP phosphoramidite base
  misc_feature (2)..(2): n is a, c, g, or t
  modified_base (23)..(23): DNP phosphoramidite base
  misc_feature (23)..(23): n is a, c, g, or t
  modified_base (44)..(44): DNP phosphoramidite base
  misc_feature (44)..(44): n is a, c, g, or t
  modified_base (65)..(65): DNP phosphoramidite base
  misc_feature (65)..(65): n is a, c, g, or t
  modified_base (86)..(86): DNP phosphoramidite base
  misc_feature (86)..(86): n is a, c, g, or t
tnataaaataacccatccatcanagatgcaaattgctacaattngaagattaccctgtacacacnagagaaaaaggctcacctatnt

SEQ ID NO: 709 - DNA, 87 bp, Artificial Sequence
  Synthetic Probe
  modified_base (2)..(2): DNP phosphoramidite base
  misc_feature (2)..(2): n is a, c, g, or t
  modified_base (23)..(23): DNP phosphoramidite base
  misc_feature (23)..(23): n is a, c, g, or t
  modified_base (44)..(44): DNP phosphoramidite base
  misc_feature (44)..(44): n is a, c, g, or t
  modified_base (65)..(65): DNP phosphoramidite base
  misc_feature (65)..(65): n is a, c, g, or t
  modified_base (86)..(86): DNP phosphoramidite base
  misc_feature (86)..(86): n is a, c, g, or t
tncatagattatatcaattcatntttaaatatttaggaagttcntttttttactttataaatctnataagcccattattatcagtnt

SEQ ID NO: 710 - DNA, 87 bp, Artificial Sequence
  Synthetic Probe
  modified_base (2)..(2): DNP phosphoramidite base
  misc_feature (2)..(2): n is a, c, g, or t
  modified_base (23)..(23): DNP phosphoramidite base
  misc_feature (23)..(23): n is a, c, g, or t
  modified_base (44)..(44): DNP phosphoramidite base
  misc_feature (44)..(44): n is a, c, g, or t
  modified_base (65)..(65): DNP phosphoramidite base
  misc_feature (65)..(65): n is a, c, g, or t
  modified_base (86)..(86): DNP phosphoramidite base
  misc_feature (86)..(86): n is a, c, g, or t
tnaatctttcactattgacttcnaggctattgtggtacaaaatnaactctatctattttcccatnctattctttcacctgcacatnt

SEQ ID NO: 711 - DNA, 87 bp, Artificial Sequence
  Synthetic Probe
  modified_base (2)..(2): DNP phosphoramidite base
  misc_feature (2)..(2): n is a, c, g, or t
  modified_base (23)..(23): DNP phosphoramidite base
  misc_feature (23)..(23): n is a, c, g, or t
  modified_base (44)..(44): DNP phosphoramidite base
  misc_feature (44)..(44): n is a, c, g, or t
  modified_base (65)..(65): DNP phosphoramidite base
  misc_feature (65)..(65): n is a, c, g, or t
  modified_base (86)..(86): DNP phosphoramidite base
  misc_feature (86)..(86): n is a, c, g, or t
tnaaaacactgagctgacaaaantctacatattttacacaaaanatatgagtacctgccttttcnttgagaaagaatctggtgatnt

SEQ ID NO: 712 - DNA, 87 bp, Artificial Sequence
  Synthetic Probe
  modified_base (2)..(2): DNP phosphoramidite base
  misc_feature (2)..(2): n is a, c, g, or t
  modified_base (23)..(23): DNP phosphoramidite base
  misc_feature (23)..(23): n is a, c, g, or t
  modified_base (44)..(44): DNP phosphoramidite base
  misc_feature (44)..(44): n is a, c, g, or t
  modified_base (65)..(65): DNP phosphoramidite base
  misc_feature (65)..(65): n is a, c, g, or t
  modified_base (86)..(86): DNP phosphoramidite base
  misc_feature (86)..(86): n is a, c, g, or t
tnttcttttcagacagtgcaagntaatttccaatattttacagntccccctgcctctattgtctntcctaatgctgacgatgaatnt

SEQ ID NO: 713 - DNA, 87 bp, Artificial Sequence
  Synthetic Probe
  modified_base (2)..(2): DNP phosphoramidite base
  misc_feature (2)..(2): n is a, c, g, or t
  modified_base (23)..(23): DNP phosphoramidite base
  misc_feature (23)..(23): n is a, c, g, or t
  modified_base (44)..(44): DNP phosphoramidite base
  misc_feature (44)..(44): n is a, c, g, or t
  modified_base (65)..(65): DNP phosphoramidite base
  misc_feature (65)..(65): n is a, c, g, or t
  modified_base (86)..(86): DNP phosphoramidite base
  misc_feature (86)..(86): n is a, c, g, or t
tngtttgttgctacattccatanacagttatggtttaaattatntagaaaagtcctaaggttttntattctaatagtatttattant

SEQ ID NO: 714 - DNA, 87 bp, Artificial Sequence
  Synthetic Probe
  modified_base (2)..(2): DNP phosphoramidite base
  misc_feature (2)..(2): n is a, c, g, or t
  modified_base (23)..(23): DNP phosphoramidite base
  misc_feature (23)..(23): n is a, c, g, or t
  modified_base (44)..(44): DNP phosphoramidite base
  misc_feature (44)..(44): n is a, c, g, or t
  modified_base (65)..(65): DNP phosphoramidite base
  misc_feature (65)..(65): n is a, c, g, or t
  modified_base (86)..(86): DNP phosphoramidite base
  misc_feature (86)..(86): n is a, c, g, or t
tnaaatacacaaacacattttgncataaaatttaaaagattcanctgatgcttagaaagatttanattctgagaaaaactgggatnt

SEQ ID NO: 715 - DNA, 87 bp, Artificial Sequence
  Synthetic Probe
  modified_base (2)..(2): DNP phosphoramidite base
  misc_feature (2)..(2): n is a, c, g, or t
  modified_base (23)..(23): DNP phosphoramidite base
  misc_feature (23)..(23): n is a, c, g, or t
  modified_base (44)..(44): DNP phosphoramidite base
  misc_feature (44)..(44): n is a, c, g, or t
  modified_base (65)..(65): DNP phosphoramidite base
  misc_feature (65)..(65): n is a, c, g, or t
  modified_base (86)..(86): DNP phosphoramidite base
  misc_feature (86)..(86): n is a, c, g, or t
tntagaaaagaaggatatccagngcggctcttggtttaaaatcntaaatgcattgtatttgacangccactttataatagaattant

SEQ ID NO: 716 - DNA, 87 bp, Artificial Sequence
  Synthetic Probe
  modified_base (2)..(2): DNP phosphoramidite base
  misc_feature (2)..(2): n is a, c, g, or t
  modified_base (23)..(23): DNP phosphoramidite base
  misc_feature (23)..(23): n is a, c, g, or t
  modified_base (44)..(44): DNP phosphoramidite base
  misc_feature (44)..(44): n is a, c, g, or t
  modified_base (65)..(65): DNP phosphoramidite base
  misc_feature (65)..(65): n is a, c, g, or t
  modified_base (86)..(86): DNP phosphoramidite base
  misc_feature (86)..(86): n is a, c, g, or t
tntaagcttttaaaaatattaancagaatcttttcattcattcnattaggaaaaggaagtggttntttcattttcattcgcaagcnt

SEQ ID NO: 717 - DNA, 87 bp, Artificial Sequence
  Synthetic Probe
  modified_base (2)..(2): DNP phosphoramidite base
  misc_feature (2)..(2): n is a, c, g, or t
  modified_base (23)..(23): DNP phosphoramidite base
  misc_feature (23)..(23): n is a, c, g, or t
  modified_base (44)..(44): DNP phosphoramidite base
  misc_feature (44)..(44): n is a, c, g, or t
  modified_base (65)..(65): DNP phosphoramidite base
  misc_feature (65)..(65): n is a, c, g, or t
  modified_base (86)..(86): DNP phosphoramidite base
  misc_feature (86)..(86): n is a, c, g, or t
tnacagttaatgcagggtttttngaatactagcaatttgaaggnattttgcattaaactttgaancacagcaagattttaaaatcnt

SEQ ID NO: 718 - DNA, 87 bp, Artificial Sequence
  Synthetic Probe
  modified_base (2)..(2): DNP phosphoramidite base
  misc_feature (2)..(2): n is a, c, g, or t
  modified_base (23)..(23): DNP phosphoramidite base
  misc_feature (23)..(23): n is a, c, g, or t
  modified_base (44)..(44): DNP phosphoramidite base
  misc_feature (44)..(44): n is a, c, g, or t
  modified_base (65)..(65): DNP phosphoramidite base
  misc_feature (65)..(65): n is a, c, g, or t
  modified_base (86)..(86): DNP phosphoramidite base
  misc_feature (86)..(86): n is a, c, g, or t
tncctgggcgagtgaatgagctncaccaaatgtataaataatgntgcccaagtctccttgttgcntcagttttttcatattcattnt

SEQ ID NO: 719 - DNA, 87 bp, Artificial Sequence
  Synthetic Probe
  modified_base (2)..(2): DNP phosphoramidite base
  misc_feature (2)..(2): n is a, c, g, or t
  modified_base (23)..(23): DNP phosphoramidite base
  misc_feature (23)..(23): n is a, c, g, or t
  modified_base (44)..(44): DNP phosphoramidite base
  misc_feature (44)..(44): n is a, c, g, or t
  modified_base (65)..(65): DNP phosphoramidite base
  misc_feature (65)..(65): n is a, c, g, or t
  modified_base (86)..(86): DNP phosphoramidite base
  misc_feature (86)..(86): n is a, c, g, or t
tncttgagcgcaattccaaactngctaatgtgttaatactttcnaccagagcttgactccagttngctgaaaaaacaaatataaant

SEQ ID NO: 720 - DNA, 87 bp, Artificial Sequence
  Synthetic Probe
  modified_base (2)..(2): DNP phosphoramidite base
  misc_feature (2)..(2): n is a, c, g, or t
  modified_base (23)..(23): DNP phosphoramidite base
  misc_feature (23)..(23): n is a, c, g, or t
  modified_base (44)..(44): DNP phosphoramidite base
  misc_feature (44)..(44): n is a, c, g, or t
  modified_base (65)..(65): DNP phosphoramidite base
  misc_feature (65)..(65): n is a, c, g, or t
  modified_base (86)..(86): DNP phosphoramidite base
  misc_feature (86)..(86): n is a, c, g, or t
tnacagtaaacccagaaggatgnacccaaacttcctgttctttnattggcagaattttgctgtgncaacttacaaagtttgacaant

SEQ ID NO: 721 - DNA, 87 bp, Artificial Sequence
  Synthetic Probe
  modified_base (2)..(2): DNP phosphoramidite base
  misc_feature (2)..(2): n is a, c, g, or t
  modified_base (23)..(23): DNP phosphoramidite base
  misc_feature (23)..(23): n is a, c, g, or t
  modified_base (44)..(44): DNP phosphoramidite base
  misc_feature (44)..(44): n is a, c, g, or t
  modified_base (65)..(65): DNP phosphoramidite base
  misc_feature (65)..(65): n is a, c, g, or t
  modified_base (86)..(86): DNP phosphoramidite base
  misc_feature (86)..(86): n is a, c, g, or t
tngccattttagagcaaagtganattttcagcaaaagctcagtngctaacactgaaaaataaagnaaggtattattcagttttaant

SEQ ID NO: 722 - DNA, 87 bp, Artificial Sequence
  Synthetic Probe
  modified_base (2)..(2): DNP phosphoramidite base
  misc_feature (2)..(2): n is a, c, g, or t
  modified_base (23)..(23): DNP phosphoramidite base
  misc_feature (23)..(23): n is a, c, g, or t
  modified_base (44)..(44): DNP phosphoramidite base
  misc_feature (44)..(44): n is a, c, g, or t
  modified_base (65)..(65): DNP phosphoramidite base
  misc_feature (65)..(65): n is a, c, g, or t
  modified_base (86)..(86): DNP phosphoramidite base
  misc_feature (86)..(86): n is a, c, g, or t
tntgaaagacatagatatttaantctgcacatatgtatttaatntttttaaatgggggaagaganggctcaagtcctagaattcant

SEQ ID NO: 723 - DNA, 87 bp, Artificial Sequence
  Synthetic Probe
  modified_base (2)..(2): DNP phosphoramidite base
  misc_feature (2)..(2): n is a, c, g, or t
  modified_base (23)..(23): DNP phosphoramidite base
  misc_feature (23)..(23): n is a, c, g, or t
  modified_base (44)..(44): DNP phosphoramidite base
  misc_feature (44)..(44): n is a, c, g, or t
  modified_base (65)..(65): DNP phosphoramidite base
  misc_feature (65)..(65): n is a, c, g, or t
  modified_base (86)..(86): DNP phosphoramidite base
  misc_feature (86)..(86): n is a, c, g, or t
tnttagttaatcaccttcttctngtaataagcagtcactgttanttatttatcctatttttaagnaaagaaaaaatttaaataaant

SEQ ID NO: 724 - DNA, 87 bp, Artificial Sequence
  Synthetic Probe
  modified_base (2)..(2): DNP phosphoramidite base
  misc_feature (2)..(2): n is a, c, g, or t
  modified_base (23)..(23): DNP phosphoramidite base
  misc_feature (23)..(23): n is a, c, g, or t
  modified_base (44)..(44): DNP phosphoramidite base
  misc_feature (44)..(44): n is a, c, g, or t
  modified_base (65)..(65): DNP phosphoramidite base
  misc_feature (65)..(65): n is a, c, g, or t
  modified_base (86)..(86): DNP phosphoramidite base
  misc_feature (86)..(86): n is a, c, g, or t
tnaacacagacacacatacacanctgtgtatgaatgcttacacnaccctcctgaccctgaacttngctggtaattttcatggacant

SEQ ID NO: 725 - DNA, 87 bp, Artificial Sequence
  Synthetic Probe
  modified_base (2)..(2): DNP phosphoramidite base
  misc_feature (2)..(2): n is a, c, g, or t
  modified_base (23)..(23): DNP phosphoramidite base
  misc_feature (23)..(23): n is a, c, g, or t
  modified_base (44)..(44): DNP phosphoramidite base
  misc_feature (44)..(44): n is a, c, g, or t
  modified_base (65)..(65): DNP phosphoramidite base
  misc_feature (65)..(65): n is a, c, g, or t
  modified_base (86)..(86): DNP phosphoramidite base
  misc_feature (86)..(86): n is a, c, g, or t
tngaagtgaaagagtagacaganagtgactacagacatttttcnaaaagtaaagtagaagactgnaagagtgtgtacgattgcaant

SEQ ID NO: 726 - DNA, 87 bp, Artificial Sequence
  Synthetic Probe
  modified_base (2)..(2): DNP phosphoramidite base
  misc_feature (2)..(2): n is a, c, g, or t
  modified_base (23)..(23): DNP phosphoramidite base
  misc_feature (23)..(23): n is a, c, g, or t
  modified_base (44)..(44): DNP phosphoramidite base
  misc_feature (44)..(44): n is a, c, g, or t
  modified_base (65)..(65): DNP phosphoramidite base
  misc_feature (65)..(65): n is a, c, g, or t
  modified_base (86)..(86): DNP phosphoramidite base
  misc_feature (86)..(86): n is a, c, g, or t
tntttcaagtcttctttgatganaagatttttctagtcctttancttcctggttggggccttcanttgaccattattttaatttcnt

SEQ ID NO: 727 - DNA, 87 bp, Artificial Sequence
  Synthetic Probe
  modified_base (2)..(2): DNP phosphoramidite base
  misc_feature (2)..(2): n is a, c, g, or t
  modified_base (23)..(23): DNP phosphoramidite base
  misc_feature (23)..(23): n is a, c, g, or t
  modified_base (44)..(44): DNP phosphoramidite base
  misc_feature (44)..(44): n is a, c, g, or t
  modified_base (65)..(65): DNP phosphoramidite base
  misc_feature (65)..(65): n is a, c, g, or t
  modified_base (86)..(86): DNP phosphoramidite base
  misc_feature (86)..(86): n is a, c, g, or t
tnaaacaaaatagacgtttttanaataatcacaaaaaatgagancattcacacatgcctgtgcantatatatctatccatacatant

SEQ ID NO: 728 - DNA, 87 bp, Artificial Sequence
  Synthetic Probe
  modified_base (2)..(2): DNP phosphoramidite base
  misc_feature (2)..(2): n is a, c, g, or t
  modified_base (23)..(23): DNP phosphoramidite base
  misc_feature (23)..(23): n is a, c, g, or t
  modified_base (44)..(44): DNP phosphoramidite base
  misc_feature (44)..(44): n is a, c, g, or t
  modified_base (65)..(65): DNP phosphoramidite base
  misc_feature (65)..(65): n is a, c, g, or t
  modified_base (86)..(86): DNP phosphoramidite base
  misc_feature (86)..(86): n is a, c, g, or t
tngccaatgaatgagcctcaganaatgcctttaaaaaggctganaaatctgaaatcatttaagancttttttggtgcatattatcnt

SEQ ID NO: 729 - DNA, 87 bp, Artificial Sequence
  Synthetic Probe
  modified_base (2)..(2): DNP phosphoramidite base
  misc_feature (2)..(2): n is a, c, g, or t
  modified_base (23)..(23): DNP phosphoramidite base
  misc_feature (23)..(23): n is a, c, g, or t
  modified_base (44)..(44): DNP phosphoramidite base
  misc_feature (44)..(44): n is a, c, g, or t
  modified_base (65)..(65): DNP phosphoramidite base
  misc_feature (65)..(65): n is a, c, g, or t
  modified_base (86)..(86): DNP phosphoramidite base
  misc_feature (86)..(86): n is a, c, g, or t
tnatggcttttttaaagctaagnaatctcctggagatgatttanataaaatgtgctgatgccttngagtactttacaacacacaant

SEQ ID NO: 730 - DNA, 87 bp, Artificial Sequence
  Synthetic Probe
  modified_base (2)..(2): DNP phosphoramidite base
  misc_feature (2)..(2): n is a, c, g, or t
  modified_base (23)..(23): DNP phosphoramidite base
  misc_feature (23)..(23): n is a, c, g, or t
  modified_base (44)..(44): DNP phosphoramidite base
  misc_feature (44)..(44): n is a, c, g, or t
  modified_base (65)..(65): DNP phosphoramidite base
  misc_feature (65)..(65): n is a, c, g, or t
  modified_base (86)..(86): DNP phosphoramidite base
  misc_feature (86)..(86): n is a, c, g, or t
tnattcagtgtgatctattcacnttcattcagaaacattttttngtgtgtgcagaccgaagaatnttttcccacaacagtaagggnt

SEQ ID NO: 731 - DNA, 87 bp, Artificial Sequence
  Synthetic Probe
  modified_base (2)..(2): DNP phosphoramidite base
  misc_feature (2)..(2): n is a, c, g, or t
  modified_base (23)..(23): DNP phosphoramidite base
  misc_feature (23)..(23): n is a, c, g, or t
  modified_base (44)..(44): DNP phosphoramidite base
  misc_feature (44)..(44): n is a, c, g, or t
  modified_base (65)..(65): DNP phosphoramidite base
  misc_feature (65)..(65): n is a, c, g, or t
  modified_base (86)..(86): DNP phosphoramidite base
  misc_feature (86)..(86): n is a, c, g, or t
tntatgtgtcttgcatcctgatntaattaaagcataacagcatncttacagcctataatctactntttttaagtgagcatttaaant

SEQ ID NO: 732 - DNA, 87 bp, Artificial Sequence
  Synthetic Probe
  modified_base (2)..(2): DNP phosphoramidite base
  misc_feature (2)..(2): n is a, c, g, or t
  modified_base (23)..(23): DNP phosphoramidite base
  misc_feature (23)..(23): n is a, c, g, or t
  modified_base (44)..(44): DNP phosphoramidite base
  misc_feature (44)..(44): n is a, c, g, or t
  modified_base (65)..(65): DNP phosphoramidite base
  misc_feature (65)..(65): n is a, c, g, or t
  modified_base (86)..(86): DNP phosphoramidite base
  misc_feature (86)..(86): n is a, c, g, or t
tnttcaaaagtacactgtatacnagaaaaccaggctgtttaaanggaccacatctcaattatatntgcatatataaattgattatnt

SEQ ID NO: 733 - DNA, 87 bp, Artificial Sequence
  Synthetic Probe
  modified_base (2)..(2): DNP phosphoramidite base
  misc_feature (2)..(2): n is a, c, g, or t
  modified_base (23)..(23): DNP phosphoramidite base
  misc_feature (23)..(23): n is a, c, g, or t
  modified_base (44)..(44): DNP phosphoramidite base
  misc_feature (44)..(44): n is a, c, g, or t
  modified_base (65)..(65): DNP phosphoramidite base
  misc_feature (65)..(65): n is a, c, g, or t
  modified_base (86)..(86): DNP phosphoramidite base
  misc_feature (86)..(86): n is a, c, g, or t
tnaaagattaatgggtatatgcntttttaataatgtgtttattntccagcagtgtttatggtacntaaggccaactttcttaaaant

SEQ ID NO: 734 - DNA, 87 bp, Artificial Sequence
  Synthetic Probe
  modified_base (2)..(2): DNP phosphoramidite base
  misc_feature (2)..(2): n is a, c, g, or t
  modified_base (23)..(23): DNP phosphoramidite base
  misc_feature (23)..(23): n is a, c, g, or t
  modified_base (44)..(44): DNP phosphoramidite base
  misc_feature (44)..(44): n is a, c, g, or t
  modified_base (65)..(65): DNP phosphoramidite base
  misc_feature (65)..(65): n is a, c, g, or t
  modified_base (86)..(86): DNP phosphoramidite base
  misc_feature (86)..(86): n is a, c, g, or t
tntctaccaacaaaattgagaanctcactccagtcccaggctanactccagtgatggggagaacngggcagtgtgggcagctaggnt

SEQ ID NO: 735 - DNA, 87 bp, Artificial Sequence
  Synthetic Probe
  modified_base (2)..(2): DNP phosphoramidite base
  misc_feature (2)..(2): n is a, c, g, or t
  modified_base (23)..(23): DNP phosphoramidite base
  misc_feature (23)..(23): n is a, c, g, or t
  modified_base (44)..(44): DNP phosphoramidite base
  misc_feature (44)..(44): n is a, c, g, or t
  modified_base (65)..(65): DNP phosphoramidite base
  misc_feature (65)..(65): n is a, c, g, or t
  modified_base (86)..(86): DNP phosphoramidite base
  misc_feature (86)..(86): n is a, c, g, or t
tntggaacacaaaatgcgtgttnataataatgtcaagcctttantcagaaatcagtacataagtngaggatacacagccaaaatgnt

SEQ ID NO: 736 - DNA, 87 bp, Artificial Sequence
  Synthetic Probe
  modified_base (2)..(2): DNP phosphoramidite base
  misc_feature (2)..(2): n is a, c, g, or t
  modified_base (23)..(23): DNP phosphoramidite base
  misc_feature (23)..(23): n is a, c, g, or t
  modified_base (44)..(44): DNP phosphoramidite base
  misc_feature (44)..(44): n is a, c, g, or t
  modified_base (65)..(65): DNP phosphoramidite base
  misc_feature (65)..(65): n is a, c, g, or t
  modified_base (86)..(86): DNP phosphoramidite base
  misc_feature (86)..(86): n is a, c, g, or t
tntatgctaaagaaaataaaacncgaaagagtagtttcaatttncacaattcacagttgattggnttttaatcccatgacacgttnt

SEQ ID NO: 737 - DNA, 87 bp, Artificial Sequence
  Synthetic Probe
  modified_base (2)..(2): DNP phosphoramidite base
  misc_feature (2)..(2): n is a, c, g, or t
  modified_base (23)..(23): DNP phosphoramidite base
  misc_feature (23)..(23): n is a, c, g, or t
  modified_base (44)..(44): DNP phosphoramidite base
  misc_feature (44)..(44): n is a, c, g, or t
  modified_base (65)..(65): DNP phosphoramidite base
  misc_feature (65)..(65): n is a, c, g, or t
  modified_base (86)..(86): DNP phosphoramidite base
  misc_feature (86)..(86): n is a, c, g, or t
tntaaacaaccctaattacacancagtttgggctgacatttttntagctatatcctttatcaaangatagttctagtgaaatagcnt

SEQ ID NO: 738 - DNA, 87 bp, Artificial Sequence
  Synthetic Probe
  modified_base (2)..(2): DNP phosphoramidite base
  misc_feature (2)..(2): n is a, c, g, or t
  modified_base (23)..(23): DNP phosphoramidite base
  misc_feature (23)..(23): n is a, c, g, or t
  modified_base (44)..(44): DNP phosphoramidite base
  misc_feature (44)..(44): n is a, c, g, or t
  modified_base (65)..(65): DNP phosphoramidite base
  misc_feature (65)..(65): n is a, c, g, or t
  modified_base (86)..(86): DNP phosphoramidite base
  misc_feature (86)..(86): n is a, c, g, or t
tnctcccttggttttacattttnattctctaatttaaaacaatnaactgcattaaaatgcaaccnttaatggtgaaagcaaaatcnt

SEQ ID NO: 739 - DNA, 87 bp, Artificial Sequence
  Synthetic Probe
  modified_base (2)..(2): DNP phosphoramidite base
  misc_feature (2)..(2): n is a, c, g, or t
  modified_base (23)..(23): DNP phosphoramidite base
  misc_feature (23)..(23): n is a, c, g, or t
  modified_base (44)..(44): DNP phosphoramidite base
  misc_feature (44)..(44): n is a, c, g, or t
  modified_base (65)..(65): DNP phosphoramidite base
  misc_feature (65)..(65): n is a, c, g, or t
  modified_base (86)..(86): DNP phosphoramidite base
  misc_feature (86)..(86): n is a, c, g, or t
tncaaactaaatcattatggtcnagtcaaggataccacaggtgnaacaccaagtaacgcagagtntaacgtgaaattcttacaaant

SEQ ID NO: 740 - DNA, 87 bp, Artificial Sequence
  Synthetic Probe
  modified_base (2)..(2): DNP phosphoramidite base
  misc_feature (2)..(2): n is a, c, g, or t
  modified_base (23)..(23): DNP phosphoramidite base
  misc_feature (23)..(23): n is a, c, g, or t
  modified_base (44)..(44): DNP phosphoramidite base
  misc_feature (44)..(44): n is a, c, g, or t
  modified_base (65)..(65): DNP phosphoramidite base
  misc_feature (65)..(65): n is a, c, g, or t
  modified_base (86)..(86): DNP phosphoramidite base
  misc_feature (86)..(86): n is a, c, g, or t
tncaaataataataaatgatatnagaacatttattattttcacntagtgagggggtcacttaagncacttacaaagacttataaant

SEQ ID NO: 741 - DNA, 87 bp, Artificial Sequence
  Synthetic Probe
  modified_base (2)..(2): DNP phosphoramidite base
  misc_feature (2)..(2): n is a, c, g, or t
  modified_base (23)..(23): DNP phosphoramidite base
  misc_feature (23)..(23): n is a, c, g, or t
  modified_base (44)..(44): DNP phosphoramidite base
  misc_feature (44)..(44): n is a, c, g, or t
  modified_base (65)..(65): DNP phosphoramidite base
  misc_feature (65)..(65): n is a, c, g, or t
  modified_base (86)..(86): DNP phosphoramidite base
  misc_feature (86)..(86): n is a, c, g, or t
tnaatgcaaaaacatccaataanatgttgcattattagtattcnaacagtgcagcaagatttttnagcaactgcgtcgggcttaant

SEQ ID NO: 742 - DNA, 87 bp, Artificial Sequence
  Synthetic Probe
  modified_base (2)..(2): DNP phosphoramidite base
  misc_feature (2)..(2): n is a, c, g, or t
  modified_base (23)..(23): DNP phosphoramidite base
  misc_feature (23)..(23): n is a, c, g, or t
  modified_base (44)..(44): DNP phosphoramidite base
  misc_feature (44)..(44): n is a, c, g, or t
  modified_base (65)..(65): DNP phosphoramidite base
  misc_feature (65)..(65): n is a, c, g, or t
  modified_base (86)..(86): DNP phosphoramidite base
  misc_feature (86)..(86): n is a, c, g, or t
tntaaagctaaagatggttactnaaggcttacaatttcaacaanctcattgtacagtacaatcantttttaattctgctaattatnt

SEQ ID NO: 743 - DNA, 87 bp, Artificial Sequence
  Synthetic Probe
  modified_base (2)..(2): DNP phosphoramidite base
  misc_feature (2)..(2): n is a, c, g, or t
  modified_base (23)..(23): DNP phosphoramidite base
  misc_feature (23)..(23): n is a, c, g, or t
  modified_base (44)..(44): DNP phosphoramidite base
  misc_feature (44)..(44): n is a, c, g, or t
  modified_base (65)..(65): DNP phosphoramidite base
  misc_feature (65)..(65): n is a, c, g, or t
  modified_base (86)..(86): DNP phosphoramidite base
  misc_feature (86)..(86): n is a, c, g, or t
tnagctggaggaagtgtggatanattacaattctcaaggaattncaaatcaaattctttagaaanaattaatagtttcaacttacnt

SEQ ID NO: 744 - DNA, 87 bp, Artificial Sequence
  Synthetic Probe
  modified_base (2)..(2): DNP phosphoramidite base
  misc_feature (2)..(2): n is a, c, g, or t
  modified_base (23)..(23): DNP phosphoramidite base
  misc_feature (23)..(23): n is a, c, g, or t
  modified_base (44)..(44): DNP phosphoramidite base
  misc_feature (44)..(44): n is a, c, g, or t
  modified_base (65)..(65): DNP phosphoramidite base
  misc_feature (65)..(65): n is a, c, g, or t
  modified_base (86)..(86): DNP phosphoramidite base
  misc_feature (86)..(86): n is a, c, g, or t
tngaaaggagaagtgacaagagnggagaaaagcagcaacagatntgaaatgaggtattcgctgantttcataaaccccaatcagtnt

SEQ ID NO: 745 - DNA, 87 bp, Artificial Sequence
  Synthetic Probe
  modified_base (2)..(2): DNP phosphoramidite base
  misc_feature (2)..(2): n is a, c, g, or t
  modified_base (23)..(23): DNP phosphoramidite base
  misc_feature (23)..(23): n is a, c, g, or t
  modified_base (44)..(44): DNP phosphoramidite base
  misc_feature (44)..(44): n is a, c, g, or t
  modified_base (65)..(65): DNP phosphoramidite base
  misc_feature (65)..(65): n is a, c, g, or t
  modified_base (86)..(86): DNP phosphoramidite base
  misc_feature (86)..(86): n is a, c, g, or t
tnaatttacagttttttgaaganagctgcatagtttggcaaaanatacattatcagaagtggggnaaaagaaaaattatattgaant

SEQ ID NO: 746 - DNA, 87 bp, Artificial Sequence
  Synthetic Probe
  modified_base (2)..(2): DNP phosphoramidite base
  misc_feature (2)..(2): n is a, c, g, or t
  modified_base (23)..(23): DNP phosphoramidite base
  misc_feature (23)..(23): n is a, c, g, or t
  modified_base (44)..(44): DNP phosphoramidite base
  misc_feature (44)..(44): n is a, c, g, or t
  modified_base (65)..(65): DNP phosphoramidite base
  misc_feature (65)..(65): n is a, c, g, or t
  modified_base (86)..(86): DNP phosphoramidite base
  misc_feature (86)..(86): n is a, c, g, or t
tnaaaatttatgacaagcacttnaaaaatgaccaattctaaaantaaacttgtgtttgaaagganattgtcctccctcaccctaant

SEQ ID NO: 747 - DNA, 87 bp, Artificial Sequence
  Synthetic Probe
  modified_base (2)..(2): DNP phosphoramidite base
  misc_feature (2)..(2): n is a, c, g, or t
  modified_base (23)..(23): DNP phosphoramidite base
  misc_feature (23)..(23): n is a, c, g, or t
  modified_base (44)..(44): DNP phosphoramidite base
  misc_feature (44)..(44): n is a, c, g, or t
  modified_base (65)..(65): DNP phosphoramidite base
  misc_feature (65)..(65): n is a, c, g, or t
  modified_base (86)..(86): DNP phosphoramidite base
  misc_feature (86)..(86): n is a, c, g, or t
tnaaaaagggaaaaaaaagacgntagaacagaattcacacagancctttgttattccaagctccntatttatgaatggtgattaant

SEQ ID NO: 748 - DNA, 87 bp, Artificial Sequence
  Synthetic Probe
  modified_base (2)..(2): DNP phosphoramidite base
  misc_feature (2)..(2): n is a, c, g, or t
  modified_base (23)..(23): DNP phosphoramidite base
  misc_feature (23)..(23): n is a, c, g, or t
  modified_base (44)..(44): DNP phosphoramidite base
  misc_feature (44)..(44): n is a, c, g, or t
  modified_base (65)..(65): DNP phosphoramidite base
  misc_feature (65)..(65): n is a, c, g, or t
  modified_base (86)..(86): DNP phosphoramidite base
  misc_feature (86)..(86): n is a, c, g, or t
tnttttttggtagctacccaganaaggaagtttacaaatgttcnctcccattcataacgggaagnaaaaagtcaaacagctatcant

SEQ ID NO: 749 - DNA, 87 bp, Artificial Sequence
  Synthetic Probe
  modified_base (2)..(2): DNP phosphoramidite base
  misc_feature (2)..(2): n is a, c, g, or t
  modified_base (23)..(23): DNP phosphoramidite base
  misc_feature (23)..(23): n is a, c, g, or t
  modified_base (44)..(44): DNP phosphoramidite base
  misc_feature (44)..(44): n is a, c, g, or t
  modified_base (65)..(65): DNP phosphoramidite base
  misc_feature (65)..(65): n is a, c, g, or t
  modified_base (86)..(86): DNP phosphoramidite base
  misc_feature (86)..(86): n is a, c, g, or t
tnagttggtaaggtcaaatttgnttttaaaacatctgttcaaanagcctgcattaaacttttatnctgtcctgacaaaacatgtcnt

SEQ ID NO: 750 - DNA, 87 bp, Artificial Sequence
  Synthetic Probe
  modified_base (2)..(2): DNP phosphoramidite base
  misc_feature (2)..(2): n is a, c, g, or t
  modified_base (23)..(23): DNP phosphoramidite base
  misc_feature (23)..(23): n is a, c, g, or t
  modified_base (44)..(44): DNP phosphoramidite base
  misc_feature (44)..(44): n is a, c, g, or t
  modified_base (65)..(65): DNP phosphoramidite base
  misc_feature (65)..(65): n is a, c, g, or t
  modified_base (86)..(86): DNP phosphoramidite base
  misc_feature (86)..(86): n is a, c, g, or t
tngatgtcaaatagccacgattncttcttttaaactcagggctntcaaaaatcctacctggtttntctaagtttaccaactaattnt

SEQ ID NO: 751 - DNA, 87 bp, Artificial Sequence
  Synthetic Probe
  modified_base (2)..(2): DNP phosphoramidite base
  misc_feature (2)..(2): n is a, c, g, or t
  modified_base (23)..(23): DNP phosphoramidite base
  misc_feature (23)..(23): n is a, c, g, or t
  modified_base (44)..(44): DNP phosphoramidite base
  misc_feature (44)..(44): n is a, c, g, or t
  modified_base (65)..(65): DNP phosphoramidite base
  misc_feature (65)..(65): n is a, c, g, or t
  modified_base (86)..(86): DNP phosphoramidite base
  misc_feature (86)..(86): n is a, c, g, or t
tnaatggtataaaaaaattattncaccttgcagaatttagtgcnaataagagacaggcagacaanacataaacaacatgcacatant

SEQ ID NO: 752 - DNA, 87 bp, Artificial Sequence
  Synthetic Probe
  modified_base (2)..(2): DNP phosphoramidite base
  misc_feature (2)..(2): n is a, c, g, or t
  modified_base (23)..(23): DNP phosphoramidite base
  misc_feature (23)..(23): n is a, c, g, or t
  modified_base (44)..(44): DNP phosphoramidite base
  misc_feature (44)..(44): n is a, c, g, or t
  modified_base (65)..(65): DNP phosphoramidite base
  misc_feature (65)..(65): n is a, c, g, or t
  modified_base (86)..(86): DNP phosphoramidite base
  misc_feature (86)..(86): n is a, c, g, or t
tnactgactcagaagaaacaacnagtctgcttaaacagagaaanaaacactgtttatggaatacnatgaatatgagaaattgtacnt

SEQ ID NO: 753 - DNA, 87 bp, Artificial Sequence
  Synthetic Probe
  modified_base (2)..(2): DNP phosphoramidite base
  misc_feature (2)..(2): n is a, c, g, or t
  modified_base (23)..(23): DNP phosphoramidite base
  misc_feature (23)..(23): n is a, c, g, or t
  modified_base (44)..(44): DNP phosphoramidite base
  misc_feature (44)..(44): n is a, c, g, or t
  modified_base (65)..(65): DNP phosphoramidite base
  misc_feature (65)..(65): n is a, c, g, or t
  modified_base (86)..(86): DNP phosphoramidite base
  misc_feature (86)..(86): n is a, c, g, or t
tntttcagatgtgcatgtaactntttacaagtgatcatggaagnttatttatcaacttcccagangtttggaatttaaggagcaant

SEQ ID NO: 754 - DNA, 87 bp, Artificial Sequence
  Synthetic Probe
  modified_base (2)..(2): DNP phosphoramidite base
  misc_feature (2)..(2): n is a, c, g, or t
  modified_base (23)..(23): DNP phosphoramidite base
  misc_feature (23)..(23): n is a, c, g, or t
  modified_base (44)..(44): DNP phosphoramidite base
  misc_feature (44)..(44): n is a, c, g, or t
  modified_base (65)..(65): DNP phosphoramidite base
  misc_feature (65)..(65): n is a, c, g, or t
  modified_base (86)..(86): DNP phosphoramidite base
  misc_feature (86)..(86): n is a, c, g, or t
tnactgagttattgtaggcaatnacggtactaaagtgtcctatnaaaacaaacacatagctcttnttttagtgcaaagaaatatant

SEQ ID NO: 755 - DNA, 87 bp, Artificial Sequence
  Synthetic Probe
  modified_base (2)..(2): DNP phosphoramidite base
  misc_feature (2)..(2): n is a, c, g, or t
  modified_base (23)..(23): DNP phosphoramidite base
  misc_feature (23)..(23): n is a, c, g, or t
  modified_base (44)..(44): DNP phosphoramidite base
  misc_feature (44)..(44): n is a, c, g, or t
  modified_base (65)..(65): DNP phosphoramidite base
  misc_feature (65)..(65): n is a, c, g, or t
  modified_base (86)..(86): DNP phosphoramidite base
  misc_feature (86)..(86): n is a, c, g, or t
tnttctttctttaaaagaaaatngtgcttatgcattcataacantccattaagggcactgggaanactggaaacctgaatccacant

SEQ ID NO: 756 - DNA, 87 bp, Artificial Sequence
  Synthetic Probe
  modified_base (2)..(2): DNP phosphoramidite base
  misc_feature (2)..(2): n is a, c, g, or t
  modified_base (23)..(23): DNP phosphoramidite base
  misc_feature (23)..(23): n is a, c, g, or t
  modified_base (44)..(44): DNP phosphoramidite base
  misc_feature (44)..(44): n is a, c, g, or t
  modified_base (65)..(65): DNP phosphoramidite base
  misc_feature (65)..(65): n is a, c, g, or t
  modified_base (86)..(86): DNP phosphoramidite base
  misc_feature (86)..(86): n is a, c, g, or t
tnaaattgttaagtggagagagncaaggggaacccttcttatanaaactatttccaatggaaaancaaagtggatgaatgacattnt

SEQ ID NO: 757 - DNA, 87 bp, Artificial Sequence
  Synthetic Probe
  modified_base (2)..(2): DNP phosphoramidite base
  misc_feature (2)..(2): n is a, c, g, or t
  modified_base (23)..(23): DNP phosphoramidite base
  misc_feature (23)..(23): n is a, c, g, or t
  modified_base (44)..(44): DNP phosphoramidite base
  misc_feature (44)..(44): n is a, c, g, or t
  modified_base (65)..(65): DNP phosphoramidite base
  misc_feature (65)..(65): n is a, c, g, or t
  modified_base (86)..(86): DNP phosphoramidite base
  misc_feature (86)..(86): n is a, c, g, or t
tngtatgcatacacacacatctnacctatggaggaaaaaaactnagatttttaggtaatcatagnaaccaagcggccagcactatnt

SEQ ID NO: 758 - DNA, 87 bp, Artificial Sequence
  Synthetic Probe
  modified_base (2)..(2): DNP phosphoramidite base
  misc_feature (2)..(2): n is a, c, g, or t
  modified_base (23)..(23): DNP phosphoramidite base
  misc_feature (23)..(23): n is a, c, g, or t
  modified_base (44)..(44): DNP phosphoramidite base
  misc_feature (44)..(44): n is a, c, g, or t
  modified_base (65)..(65): DNP phosphoramidite base
  misc_feature (65)..(65): n is a, c, g, or t
  modified_base (86)..(86): DNP phosphoramidite base
  misc_feature (86)..(86): n is a, c, g, or t
tngtttggaagtatacaagctcnattgggagtatttgaattcanagaaaatttgcgcttcaatgnatggggagacatgatacagant

SEQ ID NO: 759 - DNA, 87 bp, Artificial Sequence
  Synthetic Probe
  modified_base (2)..(2): DNP phosphoramidite base
  misc_feature (2)..(2): n is a, c, g, or t
  modified_base (23)..(23): DNP phosphoramidite base
  misc_feature (23)..(23): n is a, c, g, or t
  modified_base (44)..(44): DNP phosphoramidite base
  misc_feature (44)..(44): n is a, c, g, or t
  modified_base (65)..(65): DNP phosphoramidite base
  misc_feature (65)..(65): n is a, c, g, or t
  modified_base (86)..(86): DNP phosphoramidite base
  misc_feature (86)..(86): n is a, c, g, or t
tntttttactttgatctaaaaangaattcaatacaattctttanacagtacataaaactacaatntgcaaaagaaaatggcagaant

SEQ ID NO: 760 - DNA, 87 bp, Artificial Sequence
  Synthetic Probe
  modified_base (2)..(2): DNP phosphoramidite base
  misc_feature (2)..(2): n is a, c, g, or t
  modified_base (23)..(23): DNP phosphoramidite base
  misc_feature (23)..(23): n is a, c, g, or t
  modified_base (44)..(44): DNP phosphoramidite base
  misc_feature (44)..(44): n is a, c, g, or t
  modified_base (65)..(65): DNP phosphoramidite base
  misc_feature (65)..(65): n is a, c, g, or t
  modified_base (86)..(86): DNP phosphoramidite base
  misc_feature (86)..(86): n is a, c, g, or t
tnaggaaaattccatacaataanatagtggggttgagatttagnggatggaggggagaacgatanatatgaaaaatataatgcaant

SEQ ID NO: 761 - DNA, 87 bp, Artificial Sequence
  Synthetic Probe
  modified_base (2)..(2): DNP phosphoramidite base
  misc_feature (2)..(2): n is a, c, g, or t
  modified_base (23)..(23): DNP phosphoramidite base
  misc_feature (23)..(23): n is a, c, g, or t
  modified_base (44)..(44): DNP phosphoramidite base
  misc_feature (44)..(44): n is a, c, g, or t
  modified_base (65)..(65): DNP phosphoramidite base
  misc_feature (65)..(65): n is a, c, g, or t
  modified_base (86)..(86): DNP phosphoramidite base
  misc_feature (86)..(86): n is a, c, g, or t
tnaaaacctacacaatgaagtangtgattcaaatatggaacaanctaatccaaattagaacaacntagtcaaaatcagaatcagant

SEQ ID NO: 762 - DNA, 87 bp, Artificial Sequence
  Synthetic Probe
  modified_base (2)..(2): DNP phosphoramidite base
  misc_feature (2)..(2): n is a, c, g, or t
  modified_base (23)..(23): DNP phosphoramidite base
  misc_feature (23)..(23): n is a, c, g, or t
  modified_base (44)..(44): DNP phosphoramidite base
  misc_feature (44)..(44): n is a, c, g, or t
  modified_base (65)..(65): DNP phosphoramidite base
  misc_feature (65)..(65): n is a, c, g, or t
  modified_base (86)..(86): DNP phosphoramidite base
  misc_feature (86)..(86): n is a, c, g, or t
tnaaacagtgggtttcatgaagnataaatgaaatgggttgtaangcaatataaagaaagattgangatgctaataccttttttgant

SEQ ID NO: 763 - DNA, 87 bp, Artificial Sequence
  Synthetic Probe
  modified_base (2)..(2): DNP phosphoramidite base
  misc_feature (2)..(2): n is a, c, g, or t
  modified_base (23)..(23): DNP phosphoramidite base
  misc_feature (23)..(23): n is a, c, g, or t
  modified_base (44)..(44): DNP phosphoramidite base
  misc_feature (44)..(44): n is a, c, g, or t
  modified_base (65)..(65): DNP phosphoramidite base
  misc_feature (65)..(65): n is a, c, g, or t
  modified_base (86)..(86): DNP phosphoramidite base
  misc_feature (86)..(86): n is a, c, g, or t
tntggtggcattcaggaaagggnttacctatttgaacatctctntgtgagtagcatgggatcatngacactggaaatacagggaant

SEQ ID NO: 764 - DNA, 87 bp, Artificial Sequence
  Synthetic Probe
  modified_base (2)..(2): DNP phosphoramidite base
  misc_feature (2)..(2): n is a, c, g, or t
  modified_base (23)..(23): DNP phosphoramidite base
  misc_feature (23)..(23): n is a, c, g, or t
  modified_base (44)..(44): DNP phosphoramidite base
  misc_feature (44)..(44): n is a, c, g, or t
  modified_base (65)..(65): DNP phosphoramidite base
  misc_feature (65)..(65): n is a, c, g, or t
  modified_base (86)..(86): DNP phosphoramidite base
  misc_feature (86)..(86): n is a, c, g, or t
tnggaaacagctctgcagtgaancaatatttccccactcataantagtgcaaaattccctattcnacaataatgcaaaaactcaant

SEQ ID NO: 765 - DNA, 87 bp, Artificial Sequence
  Synthetic Probe
  modified_base (2)..(2): DNP phosphoramidite base
  misc_feature (2)..(2): n is a, c, g, or t
  modified_base (23)..(23): DNP phosphoramidite base
  misc_feature (23)..(23): n is a, c, g, or t
  modified_base (44)..(44): DNP phosphoramidite base
  misc_feature (44)..(44): n is a, c, g, or t
  modified_base (65)..(65): DNP phosphoramidite base
  misc_feature (65)..(65): n is a, c, g, or t
  modified_base (86)..(86): DNP phosphoramidite base
  misc_feature (86)..(86): n is a, c, g, or t
tntgttaattttcaacaattggncatcaacctgcaaatagagcnatggaaaacttaatttgatgnacagaatggataaaaatgtgnt

SEQ ID NO: 766 - DNA, 87 bp, Artificial Sequence
  Synthetic Probe
  modified_base (2)..(2): DNP phosphoramidite base
  misc_feature (2)..(2): n is a, c, g, or t
  modified_base (23)..(23): DNP phosphoramidite base
  misc_feature (23)..(23): n is a, c, g, or t
  modified_base (44)..(44): DNP phosphoramidite base
  misc_feature (44)..(44): n is a, c, g, or t
  modified_base (65)..(65): DNP phosphoramidite base
  misc_feature (65)..(65): n is a, c, g, or t
  modified_base (86)..(86): DNP phosphoramidite base
  misc_feature (86)..(86): n is a, c, g, or t
tnagtaaaactatagccagctcnaagttgggagtcagaaaggangaagagaatggagaggaaaanaaaaggtagggaatgggtggnt

SEQ ID NO: 767 - DNA, 87 bp, Artificial Sequence
  Synthetic Probe
  modified_base (2)..(2): DNP phosphoramidite base
  misc_feature (2)..(2): n is a, c, g, or t
  modified_base (23)..(23): DNP phosphoramidite base
  misc_feature (23)..(23): n is a, c, g, or t
  modified_base (44)..(44): DNP phosphoramidite base
  misc_feature (44)..(44): n is a, c, g, or t
  modified_base (65)..(65): DNP phosphoramidite base
  misc_feature (65)..(65): n is a, c, g, or t
  modified_base (86)..(86): DNP phosphoramidite base
  misc_feature (86)..(86): n is a, c, g, or t
tnatgctaaggacaggagaggangaggagaaaggttgctaatangaagggattaaaagtaaacangaaggttgctgctgctatttnt

SEQ ID NO: 768 - DNA, 87 bp, Artificial Sequence
  Synthetic Probe
  modified_base (2)..(2): DNP phosphoramidite base
  misc_feature (2)..(2): n is a, c, g, or t
  modified_base (23)..(23): DNP phosphoramidite base
  misc_feature (23)..(23): n is a, c, g, or t
  modified_base (44)..(44): DNP phosphoramidite base
  misc_feature (44)..(44): n is a, c, g, or t
  modified_base (65)..(65): DNP phosphoramidite base
  misc_feature (65)..(65): n is a, c, g, or t
  modified_base (86)..(86): DNP phosphoramidite base
  misc_feature (86)..(86): n is a, c, g, or t
tnggactaagctgacagacgagntagtatggttgaaagcatatnttacatttgaaaatcattttnattttgcctcatttgttggtnt

SEQ ID NO: 769 - DNA, 87 bp, Artificial Sequence
  Synthetic Probe
  modified_base (2)..(2): DNP phosphoramidite base
  misc_feature (2)..(2): n is a, c, g, or t
  modified_base (23)..(23): DNP phosphoramidite base
  misc_feature (23)..(23): n is a, c, g, or t
  modified_base (44)..(44): DNP phosphoramidite base
  misc_feature (44)..(44): n is a, c, g, or t
  modified_base (65)..(65): DNP phosphoramidite base
  misc_feature (65)..(65): n is a, c, g, or t
  modified_base (86)..(86): DNP phosphoramidite base
  misc_feature (86)..(86): n is a, c, g, or t
tntaagaatataatatttgatgngcttcattaaaaataaaacanatagctaatgatgttttgaangccaactgaccagtttttaant

SEQ ID NO: 770 - DNA, 87 bp, Artificial Sequence
  Synthetic Probe
  modified_base (2)..(2): DNP phosphoramidite base
  misc_feature (2)..(2): n is a, c, g, or t
  modified_base (23)..(23): DNP phosphoramidite base
  misc_feature (23)..(23): n is a, c, g, or t
  modified_base (44)..(44): DNP phosphoramidite base
  misc_feature (44)..(44): n is a, c, g, or t
  modified_base (65)..(65): DNP phosphoramidite base
  misc_feature (65)..(65): n is a, c, g, or t
  modified_base (86)..(86): DNP phosphoramidite base
  misc_feature (86)..(86): n is a, c, g, or t
tngaccatttctatcttattganaatccagatttcacttctaangattacctttcttctatgttnaccctaacataattgctctgnt

SEQ ID NO: 771 - DNA, 87 bp, Artificial Sequence
  Synthetic Probe
  modified_base (2)..(2): DNP phosphoramidite base
  misc_feature (2)..(2): n is a, c, g, or t
  modified_base (23)..(23): DNP phosphoramidite base
  misc_feature (23)..(23): n is a, c, g, or t
  modified_base (44)..(44): DNP phosphoramidite base
  misc_feature (44)..(44): n is a, c, g, or t
  modified_base (65)..(65): DNP phosphoramidite base
  misc_feature (65)..(65): n is a, c, g, or t
  modified_base (86)..(86): DNP phosphoramidite base
  misc_feature (86)..(86): n is a, c, g, or t
tngtctcattcgaatctttgctntctgaagtcttagcaatatanctttattatacccaaactttntcattttctgtaagctcctant

SEQ ID NO: 772 - DNA, 87 bp, Artificial Sequence
  Synthetic Probe
  modified_base (2)..(2): DNP phosphoramidite base
  misc_feature (2)..(2): n is a, c, g, or t
  modified_base (23)..(23): DNP phosphoramidite base
  misc_feature (23)..(23): n is a, c, g, or t
  modified_base (44)..(44): DNP phosphoramidite base
  misc_feature (44)..(44): n is a, c, g, or t
  modified_base (65)..(65): DNP phosphoramidite base
  misc_feature (65)..(65): n is a, c, g, or t
  modified_base (86)..(86): DNP phosphoramidite base
  misc_feature (86)..(86): n is a, c, g, or t
tntcttatattttctaatttatnttattcactgtatcactgagngaaactgaaattaagtataanttactaatcttgtcaactacnt

SEQ ID NO: 773 - DNA, 87 bp, Artificial Sequence
  Synthetic Probe
  modified_base (2)..(2): DNP phosphoramidite base
  misc_feature (2)..(2): n is a, c, g, or t
  modified_base (23)..(23): DNP phosphoramidite base
  misc_feature (23)..(23): n is a, c, g, or t
  modified_base (44)..(44): DNP phosphoramidite base
  misc_feature (44)..(44): n is a, c, g, or t
  modified_base (65)..(65): DNP phosphoramidite base
  misc_feature (65)..(65): n is a, c, g, or t
  modified_base (86)..(86): DNP phosphoramidite base
  misc_feature (86)..(86): n is a, c, g, or t
tnttagaacatacgcaaaaatgntaaaataaaagaaaaaaacanaatgttgattctgcttatctnagttttagccttataatccant

SEQ ID NO: 774 - DNA, 87 bp, Artificial Sequence
  Synthetic Probe
  modified_base (2)..(2): DNP phosphoramidite base
  misc_feature (2)..(2): n is a, c, g, or t
  modified_base (23)..(23): DNP phosphoramidite base
  misc_feature (23)..(23): n is a, c, g, or t
  modified_base (44)..(44): DNP phosphoramidite base
  misc_feature (44)..(44): n is a, c, g, or t
  modified_base (65)..(65): DNP phosphoramidite base
  misc_feature (65)..(65): n is a, c, g, or t
  modified_base (86)..(86): DNP phosphoramidite base
  misc_feature (86)..(86): n is a, c, g, or t
tnaagttttattaggagaaaaanaagaaataaggtatatgtatnaatccatggacatgttaaaanttacacactgcccgagagttnt

SEQ ID NO: 775 - DNA, 87 bp, Artificial Sequence
  Synthetic Probe
  modified_base (2)..(2): DNP phosphoramidite base
  misc_feature (2)..(2): n is a, c, g, or t
  modified_base (23)..(23): DNP phosphoramidite base
  misc_feature (23)..(23): n is a, c, g, or t
  modified_base (44)..(44): DNP phosphoramidite base
  misc_feature (44)..(44): n is a, c, g, or t
  modified_base (65)..(65): DNP phosphoramidite base
  misc_feature (65)..(65): n is a, c, g, or t
  modified_base (86)..(86): DNP phosphoramidite base
  misc_feature (86)..(86): n is a, c, g, or t
tngtccagaccccttccctcagngcacacttacacttaaacacntcttaatgataatcatgcacnagacaaaaacaccacgagctnt

SEQ ID NO: 776 - DNA, 87 bp, Artificial Sequence
  Synthetic Probe
  modified_base (2)..(2): DNP phosphoramidite base
  misc_feature (2)..(2): n is a, c, g, or t
  modified_base (23)..(23): DNP phosphoramidite base
  misc_feature (23)..(23): n is a, c, g, or t
  modified_base (44)..(44): DNP phosphoramidite base
  misc_feature (44)..(44): n is a, c, g, or t
  modified_base (65)..(65): DNP phosphoramidite base
  misc_feature (65)..(65): n is a, c, g, or t
  modified_base (86)..(86): DNP phosphoramidite base
  misc_feature (86)..(86): n is a, c, g, or t
tnactgatagtctctattataanttccctcagaaaagacccaanaatgttcctctccctcttcanatctttatccataatgtctcnt

SEQ ID NO: 777 - DNA, 87 bp, Artificial Sequence
  Synthetic Probe
  modified_base (2)..(2): DNP phosphoramidite base
  misc_feature (2)..(2): n is a, c, g, or t
  modified_base (23)..(23): DNP phosphoramidite base
  misc_feature (23)..(23): n is a, c, g, or t
  modified_base (44)..(44): DNP phosphoramidite base
  misc_feature (44)..(44): n is a, c, g, or t
  modified_base (65)..(65): DNP phosphoramidite base
  misc_feature (65)..(65): n is a, c, g, or t
  modified_base (86)..(86): DNP phosphoramidite base
  misc_feature (86)..(86): n is a, c, g, or t
tncaatataaacagaaaatcaanatgctaccaattgcctaggcnatgtctggacttgttttatgnaaagctcactttcacttgagnt

SEQ ID NO: 778 - DNA, 87 bp, Artificial Sequence
  Synthetic Probe
  modified_base (2)..(2): DNP phosphoramidite base
  misc_feature (2)..(2): n is a, c, g, or t
  modified_base (23)..(23): DNP phosphoramidite base
  misc_feature (23)..(23): n is a, c, g, or t
  modified_base (44)..(44): DNP phosphoramidite base
  misc_feature (44)..(44): n is a, c, g, or t
  modified_base (65)..(65): DNP phosphoramidite base
  misc_feature (65)..(65): n is a, c, g, or t
  modified_base (86)..(86): DNP phosphoramidite base
  misc_feature (86)..(86): n is a, c, g, or t
tntacaatttttaaagagtagcnttgatatcccaaatttatttncttgttatatttaacaatcanacacaatgtcgactcctcaant

SEQ ID NO: 779 - DNA, 87 bp, Artificial Sequence
  Synthetic Probe
  modified_base (2)..(2): DNP phosphoramidite base
  misc_feature (2)..(2): n is a, c, g, or t
  modified_base (23)..(23): DNP phosphoramidite base
  misc_feature (23)..(23): n is a, c, g, or t
  modified_base (44)..(44): DNP phosphoramidite base
  misc_feature (44)..(44): n is a, c, g, or t
  modified_base (65)..(65): DNP phosphoramidite base
  misc_feature (65)..(65): n is a, c, g, or t
  modified_base (86)..(86): DNP phosphoramidite base
  misc_feature (86)..(86): n is a, c, g, or t
tnaaaaatctatgtatgacaatntgcatcaaatattagtacatnttgcaaacaaaaattagtatnaaaatataaatcttaaaatgnt

SEQ ID NO: 780 - DNA, 87 bp, Artificial Sequence
  Synthetic Probe
  modified_base (2)..(2): DNP phosphoramidite base
  misc_feature (2)..(2): n is a, c, g, or t
  modified_base (23)..(23): DNP phosphoramidite base
  misc_feature (23)..(23): n is a, c, g, or t
  modified_base (44)..(44): DNP phosphoramidite base
  misc_feature (44)..(44): n is a, c, g, or t
  modified_base (65)..(65): DNP phosphoramidite base
  misc_feature (65)..(65): n is a, c, g, or t
  modified_base (86)..(86): DNP phosphoramidite base
  misc_feature (86)..(86): n is a, c, g, or t
tnactgtgttaaagacaatctcnttgtctcatttggagaaatcntacagaggaaagagaataganataaaggaacaggttaggagnt

SEQ ID NO: 781 - DNA, 87 bp, Artificial Sequence
  Synthetic Probe
  modified_base (2)..(2): DNP phosphoramidite base
  misc_feature (2)..(2): n is a, c, g, or t
  modified_base (23)..(23): DNP phosphoramidite base
  misc_feature (23)..(23): n is a, c, g, or t
  modified_base (44)..(44): DNP phosphoramidite base
  misc_feature (44)..(44): n is a, c, g, or t
  modified_base (65)..(65): DNP phosphoramidite base
  misc_feature (65)..(65): n is a, c, g, or t
  modified_base (86)..(86): DNP phosphoramidite base
  misc_feature (86)..(86): n is a, c, g, or t
tngagagggccaaggcagctgcnacgcacagatgatccacctgngtccacgtgaaatgcctgaanacaagcaaactgataaatagnt

SEQ ID NO: 782 - DNA, 87 bp, Artificial Sequence
  Synthetic Probe
  modified_base (2)..(2): DNP phosphoramidite base
  misc_feature (2)..(2): n is a, c, g, or t
  modified_base (23)..(23): DNP phosphoramidite base
  misc_feature (23)..(23): n is a, c, g, or t
  modified_base (44)..(44): DNP phosphoramidite base
  misc_feature (44)..(44): n is a, c, g, or t
  modified_base (65)..(65): DNP phosphoramidite base
  misc_feature (65)..(65): n is a, c, g, or t
  modified_base (86)..(86): DNP phosphoramidite base
  misc_feature (86)..(86): n is a, c, g, or t
tntatgaagtacaaacatatacnacacagtgtacaccagccatnttggggagagtaatccatcancctgaattgtttttccagctnt

SEQ ID NO: 783 - DNA, 87 bp, Artificial Sequence
  Synthetic Probe
  modified_base (2)..(2): DNP phosphoramidite base
  misc_feature (2)..(2): n is a, c, g, or t
  modified_base (23)..(23): DNP phosphoramidite base
  misc_feature (23)..(23): n is a, c, g, or t
  modified_base (44)..(44): DNP phosphoramidite base
  misc_feature (44)..(44): n is a, c, g, or t
  modified_base (65)..(65): DNP phosphoramidite base
  misc_feature (65)..(65): n is a, c, g, or t
  modified_base (86)..(86): DNP phosphoramidite base
  misc_feature (86)..(86): n is a, c, g, or t
tnctttatgtgtcactattttanaagggctatattgtttctaanaataataaatgctgctaaaantccactctccagccccttttnt

SEQ ID NO: 784 - DNA, 87 bp, Artificial Sequence
  Synthetic Probe
  modified_base (2)..(2): DNP phosphoramidite base
  misc_feature (2)..(2): n is a, c, g, or t
  modified_base (23)..(23): DNP phosphoramidite base
  misc_feature (23)..(23): n is a, c, g, or t
  modified_base (44)..(44): DNP phosphoramidite base
  misc_feature (44)..(44): n is a, c, g, or t
  modified_base (65)..(65): DNP phosphoramidite base
  misc_feature (65)..(65): n is a, c, g, or t
  modified_base (86)..(86): DNP phosphoramidite base
  misc_feature (86)..(86): n is a, c, g, or t
tnctgccctgtaaataccttgangtccaggaaggataaatgtcnttggagttttcaagttttatngtttgatagtttgatgtgttnt

SEQ ID NO: 785 - DNA, 87 bp, Artificial Sequence
  Synthetic Probe
  modified_base (2)..(2): DNP phosphoramidite base
  misc_feature (2)..(2): n is a, c, g, or t
  modified_base (23)..(23): DNP phosphoramidite base
  misc_feature (23)..(23): n is a, c, g, or t
  modified_base (44)..(44): DNP phosphoramidite base
  misc_feature (44)..(44): n is a, c, g, or t
  modified_base (65)..(65): DNP phosphoramidite base
  misc_feature (65)..(65): n is a, c, g, or t
  modified_base (86)..(86): DNP phosphoramidite base
  misc_feature (86)..(86): n is a, c, g, or t
tnaacaataatgcaatctgccancaaagatgggggaaccaattnttctctccccagagatattgngtgtatgtcccaaagaaaggnt

SEQ ID NO: 786 - DNA, 87 bp, Artificial Sequence
  Synthetic Probe
  modified_base (2)..(2): DNP phosphoramidite base
  misc_feature (2)..(2): n is a, c, g, or t
  modified_base (23)..(23): DNP phosphoramidite base
  misc_feature (23)..(23): n is a, c, g, or t
  modified_base (44)..(44): DNP phosphoramidite base
  misc_feature (44)..(44): n is a, c, g, or t
  modified_base (65)..(65): DNP phosphoramidite base
  misc_feature (65)..(65): n is a, c, g, or t
  modified_base (86)..(86): DNP phosphoramidite base
  misc_feature (86)..(86): n is a, c, g, or t
tnaaatccccacccacccaccangccacacacacccagtcgttngggattcctttgaaagaaacntgtggagctagaaataatacnt

SEQ ID NO: 787 - DNA, 87 bp, Artificial Sequence
  Synthetic Probe
  modified_base (2)..(2): DNP phosphoramidite base
  misc_feature (2)..(2): n is a, c, g, or t
  modified_base (23)..(23): DNP phosphoramidite base
  misc_feature (23)..(23): n is a, c, g, or t
  modified_base (44)..(44): DNP phosphoramidite base
  misc_feature (44)..(44): n is a, c, g, or t
  modified_base (65)..(65): DNP phosphoramidite base
  misc_feature (65)..(65): n is a, c, g, or t
  modified_base (86)..(86): DNP phosphoramidite base
  misc_feature (86)..(86): n is a, c, g, or t
tnggggctgatgagcctacaggntcggaaaggggaaggataganactgaatgaacagagcactgnatctgatagcagagaaaaaant

SEQ ID NO: 788 - DNA, 87 bp, Artificial Sequence
  Synthetic Probe
  modified_base (2)..(2): DNP phosphoramidite base
  misc_feature (2)..(2): n is a, c, g, or t
  modified_base (23)..(23): DNP phosphoramidite base
  misc_feature (23)..(23): n is a, c, g, or t
  modified_base (44)..(44): DNP phosphoramidite base
  misc_feature (44)..(44): n is a, c, g, or t
  modified_base (65)..(65): DNP phosphoramidite base
  misc_feature (65)..(65): n is a, c, g, or t
  modified_base (86)..(86): DNP phosphoramidite base
  misc_feature (86)..(86): n is a, c, g, or t
tncagaccgacttctttctttanaatcatcagagaatgcctccnaacattcattgtctctcatanataacctcggcttttcaacant

SEQ ID NO: 789 - DNA, 87 bp, Artificial Sequence
  Synthetic Probe
  modified_base (2)..(2): DNP phosphoramidite base
  misc_feature (2)..(2): n is a, c, g, or t
  modified_base (23)..(23): DNP phosphoramidite base
  misc_feature (23)..(23): n is a, c, g, or t
  modified_base (44)..(44): DNP phosphoramidite base
  misc_feature (44)..(44): n is a, c, g, or t
  modified_base (65)..(65): DNP phosphoramidite base
  misc_feature (65)..(65): n is a, c, g, or t
  modified_base (86)..(86): DNP phosphoramidite base
  misc_feature (86)..(86): n is a, c, g, or t
tnagtaaagcaatacaaaaatcntcaaatccagcaaaataggcntctcgtgcattttaataatanttctaacattttttagcctant

SEQ ID NO: 790 - DNA, 87 bp, Artificial Sequence
  Synthetic Probe
  modified_base (2)..(2): DNP phosphoramidite base
  misc_feature (2)..(2): n is a, c, g, or t
  modified_base (23)..(23): DNP phosphoramidite base
  misc_feature (23)..(23): n is a, c, g, or t
  modified_base (44)..(44): DNP phosphoramidite base
  misc_feature (44)..(44): n is a, c, g, or t
  modified_base (65)..(65): DNP phosphoramidite base
  misc_feature (65)..(65): n is a, c, g, or t
  modified_base (86)..(86): DNP phosphoramidite base
  misc_feature (86)..(86): n is a, c, g, or t
tnagtggaaacatggcaacagcnagtcgcaaattttttttcccntgaattcccctaattttaaanaatggaccttgagaagaatgnt

SEQ ID NO: 791 - DNA, 87 bp, Artificial Sequence
  Synthetic Probe
  modified_base (2)..(2): DNP phosphoramidite base
  misc_feature (2)..(2): n is a, c, g, or t
  modified_base (23)..(23): DNP phosphoramidite base
  misc_feature (23)..(23): n is a, c, g, or t
  modified_base (44)..(44): DNP phosphoramidite base
  misc_feature (44)..(44): n is a, c, g, or t
  modified_base (65)..(65): DNP phosphoramidite base
  misc_feature (65)..(65): n is a, c, g, or t
  modified_base (86)..(86): DNP phosphoramidite base
  misc_feature (86)..(86): n is a, c, g, or t
tnctgcaggtgtgagtacagctntagttcataaacctagatttntattagccatatctccaaccntgtagctatcttgggccactnt

SEQ ID NO: 792 - DNA, 87 bp, Artificial Sequence
  Synthetic Probe
  modified_base (2)..(2): DNP phosphoramidite base
  misc_feature (2)..(2): n is a, c, g, or t
  modified_base (23)..(23): DNP phosphoramidite base
  misc_feature (23)..(23): n is a, c, g, or t
  modified_base (44)..(44): DNP phosphoramidite base
  misc_feature (44)..(44): n is a, c, g, or t
  modified_base (65)..(65): DNP phosphoramidite base
  misc_feature (65)..(65): n is a, c, g, or t
  modified_base (86)..(86): DNP phosphoramidite base
  misc_feature (86)..(86): n is a, c, g, or t
tntggaaaatgacaggaggacanagagcagagggagctctagangtctgaattaagaaatgtgtncctaaaccacctatccgtcant

SEQ ID NO: 793 - DNA, 87 bp, Artificial Sequence
  Synthetic Probe
  modified_base (2)..(2): DNP phosphoramidite base
  misc_feature (2)..(2): n is a, c, g, or t
  modified_base (23)..(23): DNP phosphoramidite base
  misc_feature (23)..(23): n is a, c, g, or t
  modified_base (44)..(44): DNP phosphoramidite base
  misc_feature (44)..(44): n is a, c, g, or t
  modified_base (65)..(65): DNP phosphoramidite base
  misc_feature (65)..(65): n is a, c, g, or t
  modified_base (86)..(86): DNP phosphoramidite base
  misc_feature (86)..(86): n is a, c, g, or t
tncaaaggaatggaaagaccctnggagattctctagtagccctnactatagggaaggcagctggngaacctggaagtgaggactcnt

SEQ ID NO: 794 - DNA, 87 bp, Artificial Sequence
  Synthetic Probe
  modified_base (2)..(2): DNP phosphoramidite base
  misc_feature (2)..(2): n is a, c, g, or t
  modified_base (23)..(23): DNP phosphoramidite base
  misc_feature (23)..(23): n is a, c, g, or t
  modified_base (44)..(44): DNP phosphoramidite base
  misc_feature (44)..(44): n is a, c, g, or t
  modified_base (65)..(65): DNP phosphoramidite base
  misc_feature (65)..(65): n is a, c, g, or t
  modified_base (86)..(86): DNP phosphoramidite base
  misc_feature (86)..(86): n is a, c, g, or t
tnctcccacaaggaaggaaacantgggtgcccagagttcccaanggctttcagctcatgacttcncaccctcaggaaagaccgaant

SEQ ID NO: 795 - DNA, 87 bp, Artificial Sequence
  Synthetic Probe
  modified_base (2)..(2): DNP phosphoramidite base
  misc_feature (2)..(2): n is a, c, g, or t
  modified_base (23)..(23): DNP phosphoramidite base
  misc_feature (23)..(23): n is a, c, g, or t
  modified_base (44)..(44): DNP phosphoramidite base
  misc_feature (44)..(44): n is a, c, g, or t
  modified_base (65)..(65): DNP phosphoramidite base
  misc_feature (65)..(65): n is a, c, g, or t
  modified_base (86)..(86): DNP phosphoramidite base
  misc_feature (86)..(86): n is a, c, g, or t
tntgtttctattgtttaatttcnacttttctttcggtttccatnttagtaggagaagatccaccnagtaattgaagatctttctgnt

SEQ ID NO: 796 - DNA, 87 bp, Artificial Sequence
  Synthetic Probe
  modified_base (2)..(2): DNP phosphoramidite base
  misc_feature (2)..(2): n is a, c, g, or t
  modified_base (23)..(23): DNP phosphoramidite base
  misc_feature (23)..(23): n is a, c, g, or t
  modified_base (44)..(44): DNP phosphoramidite base
  misc_feature (44)..(44): n is a, c, g, or t
  modified_base (65)..(65): DNP phosphoramidite base
  misc_feature (65)..(65): n is a, c, g, or t
  modified_base (86)..(86): DNP phosphoramidite base
  misc_feature (86)..(86): n is a, c, g, or t
tntcaaagaaatcatcagagacntataagataaacaaaaaccanaaagaacaaaatgaatatatncacaaggaaaagtgtttgtcnt

SEQ ID NO: 797 - DNA, 87 bp, Artificial Sequence
  Synthetic Probe
  modified_base (2)..(2): DNP phosphoramidite base
  misc_feature (2)..(2): n is a, c, g, or t
  modified_base (23)..(23): DNP phosphoramidite base
  misc_feature (23)..(23): n is a, c, g, or t
  modified_base (44)..(44): DNP phosphoramidite base
  misc_feature (44)..(44): n is a, c, g, or t
  modified_base (65)..(65): DNP phosphoramidite base
  misc_feature (65)..(65): n is a, c, g, or t
  modified_base (86)..(86): DNP phosphoramidite base
  misc_feature (86)..(86): n is a, c, g, or t
tnttaggagtctggatgtgattntttaaaaaagtctgtttcttnggatttctttatatttgtatntataatcatacattgcaaacnt

SEQ ID NO: 798 - DNA, 87 bp, Artificial Sequence
  Synthetic Probe
  modified_base (2)..(2): DNP phosphoramidite base
  misc_feature (2)..(2): n is a, c, g, or t
  modified_base (23)..(23): DNP phosphoramidite base
  misc_feature (23)..(23): n is a, c, g, or t
  modified_base (44)..(44): DNP phosphoramidite base
  misc_feature (44)..(44): n is a, c, g, or t
  modified_base (65)..(65): DNP phosphoramidite base
  misc_feature (65)..(65): n is a, c, g, or t
  modified_base (86)..(86): DNP phosphoramidite base
  misc_feature (86)..(86): n is a, c, g, or t
tntctgtcaaccattaatcttcnccaaacataccaaagctctgnaaagcctcagtttttagaatncacccccaaagatttaccttnt

SEQ ID NO: 799 - DNA, 87 bp, Artificial Sequence
  Synthetic Probe
  modified_base (2)..(2): DNP phosphoramidite base
  misc_feature (2)..(2): n is a, c, g, or t
  modified_base (23)..(23): DNP phosphoramidite base
  misc_feature (23)..(23): n is a, c, g, or t
  modified_base (44)..(44): DNP phosphoramidite base
  misc_feature (44)..(44): n is a, c, g, or t
  modified_base (65)..(65): DNP phosphoramidite base
  misc_feature (65)..(65): n is a, c, g, or t
  modified_base (86)..(86): DNP phosphoramidite base
  misc_feature (86)..(86): n is a, c, g, or t
tntttgaatatgtacccttgctnctaataggaaaggcctattantaaagcaaatcatacaattcnaatgaacttggctcaggtttnt

SEQ ID NO: 800 - DNA, 87 bp, Artificial Sequence
  Synthetic Probe
  modified_base (2)..(2): DNP phosphoramidite base
  misc_feature (2)..(2): n is a, c, g, or t
  modified_base (23)..(23): DNP phosphoramidite base
  misc_feature (23)..(23): n is a, c, g, or t
  modified_base (44)..(44): DNP phosphoramidite base
  misc_feature (44)..(44): n is a, c, g, or t
  modified_base (65)..(65): DNP phosphoramidite base
  misc_feature (65)..(65): n is a, c, g, or t
  modified_base (86)..(86): DNP phosphoramidite base
  misc_feature (86)..(86): n is a, c, g, or t
tnttacccacaaggattctgaanacagattttataggtggcttntaattatatcatttttttgtnttaaattattgtatggttttnt

SEQ ID NO: 801 - DNA, 87 bp, Artificial Sequence
  Synthetic Probe
  modified_base (2)..(2): DNP phosphoramidite base
  misc_feature (2)..(2): n is a, c, g, or t
  modified_base (23)..(23): DNP phosphoramidite base
  misc_feature (23)..(23): n is a, c, g, or t
  modified_base (44)..(44): DNP phosphoramidite base
  misc_feature (44)..(44): n is a, c, g, or t
  modified_base (65)..(65): DNP phosphoramidite base
  misc_feature (65)..(65): n is a, c, g, or t
  modified_base (86)..(86): DNP phosphoramidite base
  misc_feature (86)..(86): n is a, c, g, or t
tntttttaaacaccactgaaagnagcggttgttttgtatagttnactcatccccataaatcatanctaaggtttaagctattttgnt

SEQ ID NO: 802 - DNA, 87 bp, Artificial Sequence
  Synthetic Probe
  modified_base (2)..(2): DNP phosphoramidite base
  misc_feature (2)..(2): n is a, c, g, or t
  modified_base (23)..(23): DNP phosphoramidite base
  misc_feature (23)..(23): n is a, c, g, or t
  modified_base (44)..(44): DNP phosphoramidite base
  misc_feature (44)..(44): n is a, c, g, or t
  modified_base (65)..(65): DNP phosphoramidite base
  misc_feature (65)..(65): n is a, c, g, or t
  modified_base (86)..(86): DNP phosphoramidite base
  misc_feature (86)..(86): n is a, c, g, or t
tnactgctcactctactgtagtntggagtaatgctaactttttnttctgggaagtttaatgaggnaagtcttcagggacccttccnt

SEQ ID NO: 803 - DNA, 87 bp, Artificial Sequence
  Synthetic Probe
  modified_base (2)..(2): DNP phosphoramidite base
  misc_feature (2)..(2): n is a, c, g, or t
  modified_base (23)..(23): DNP phosphoramidite base
  misc_feature (23)..(23): n is a, c, g, or t
  modified_base (44)..(44): DNP phosphoramidite base
  misc_feature (44)..(44): n is a, c, g, or t
  modified_base (65)..(65): DNP phosphoramidite base
  misc_feature (65)..(65): n is a, c, g, or t
  modified_base (86)..(86): DNP phosphoramidite base
  misc_feature (86)..(86): n is a, c, g, or t
tnacttgttcacaacctttgatncattttggttattttattttnagtatgaacattttatatatntcatgggttttaagcttatgnt

SEQ ID NO: 804 - DNA, 87 bp, Artificial Sequence
  Synthetic Probe
  modified_base (2)..(2): DNP phosphoramidite base
  misc_feature (2)..(2): n is a, c, g, or t
  modified_base (23)..(23): DNP phosphoramidite base
  misc_feature (23)..(23): n is a, c, g, or t
  modified_base (44)..(44): DNP phosphoramidite base
  misc_feature (44)..(44): n is a, c, g, or t
  modified_base (65)..(65): DNP phosphoramidite base
  misc_feature (65)..(65): n is a, c, g, or t
  modified_base (86)..(86): DNP phosphoramidite base
  misc_feature (86)..(86): n is a, c, g, or t
tntaaaatatgtagcattttaangatgacaaaaagaatcattancaatagctcttaaaatggaantttcaggtatatttgtattant

SEQ ID NO: 805 - DNA, 87 bp, Artificial Sequence
  Synthetic Probe
  modified_base (2)..(2): DNP phosphoramidite base
  misc_feature (2)..(2): n is a, c, g, or t
  modified_base (23)..(23): DNP phosphoramidite base
  misc_feature (23)..(23): n is a, c, g, or t
  modified_base (44)..(44): DNP phosphoramidite base
  misc_feature (44)..(44): n is a, c, g, or t
  modified_base (65)..(65): DNP phosphoramidite base
  misc_feature (65)..(65): n is a, c, g, or t
  modified_base (86)..(86): DNP phosphoramidite base
  misc_feature (86)..(86): n is a, c, g, or t
tnaaactcactggcataggaagntaaaactaagcagagcttcantatatgtaaacaaaacatttngtttatgggaaattatgttant

SEQ ID NO: 806 - DNA, 87 bp, Artificial Sequence
  Synthetic Probe
  modified_base (2)..(2): DNP phosphoramidite base
  misc_feature (2)..(2): n is a, c, g, or t
  modified_base (23)..(23): DNP phosphoramidite base
  misc_feature (23)..(23): n is a, c, g, or t
  modified_base (44)..(44): DNP phosphoramidite base
  misc_feature (44)..(44): n is a, c, g, or t
  modified_base (65)..(65): DNP phosphoramidite base
  misc_feature (65)..(65): n is a, c, g, or t
  modified_base (86)..(86): DNP phosphoramidite base
  misc_feature (86)..(86): n is a, c, g, or t
tnattataagtaaatacacaaancaaatacatataggaatttgnaaaagatgcaacctcatgctntcaaaataatgaatatgtaant

SEQ ID NO: 807 - DNA, 87 bp, Artificial Sequence
  Synthetic Probe
  modified_base (2)..(2): DNP phosphoramidite base
  misc_feature (2)..(2): n is a, c, g, or t
  modified_base (23)..(23): DNP phosphoramidite base
  misc_feature (23)..(23): n is a, c, g, or t
  modified_base (44)..(44): DNP phosphoramidite base
  misc_feature (44)..(44): n is a, c, g, or t
  modified_base (65)..(65): DNP phosphoramidite base
  misc_feature (65)..(65): n is a, c, g, or t
  modified_base (86)..(86): DNP phosphoramidite base
  misc_feature (86)..(86): n is a, c, g, or t
tntattctagagcagtcaggtancctacctttggaccttaggcncctgcggagatatataagagnaacatccaatcctttggcacnt

SEQ ID NO: 808 - DNA, 87 bp, Artificial Sequence
  Synthetic Probe
  modified_base (2)..(2): DNP phosphoramidite base
  misc_feature (2)..(2): n is a, c, g, or t
  modified_base (23)..(23): DNP phosphoramidite base
  misc_feature (23)..(23): n is a, c, g, or t
  modified_base (44)..(44): DNP phosphoramidite base
  misc_feature (44)..(44): n is a, c, g, or t
  modified_base (65)..(65): DNP phosphoramidite base
  misc_feature (65)..(65): n is a, c, g, or t
  modified_base (86)..(86): DNP phosphoramidite base
  misc_feature (86)..(86): n is a, c, g, or t
tncatgttcagaatcaatctagnccagtttttaatttggggagngatgagagatacacctgaaanctattctgctaccttttagcnt

SEQ ID NO: 809 - DNA, 87 bp, Artificial Sequence
  Synthetic Probe
  modified_base (2)..(2): DNP phosphoramidite base
  misc_feature (2)..(2): n is a, c, g, or t
  modified_base (23)..(23): DNP phosphoramidite base
  misc_feature (23)..(23): n is a, c, g, or t
  modified_base (44)..(44): DNP phosphoramidite base
  misc_feature (44)..(44): n is a, c, g, or t
  modified_base (65)..(65): DNP phosphoramidite base
  misc_feature (65)..(65): n is a, c, g, or t
  modified_base (86)..(86): DNP phosphoramidite base
  misc_feature (86)..(86): n is a, c, g, or t
tncaaatctggaggataaataanagctctgcaaagtaaatggcnatgtgaaaaaaaaagctacantcttagaaatggaaagcaaant

SEQ ID NO: 810 - DNA, 87 bp, Artificial Sequence
  Synthetic Probe
  modified_base (2)..(2): DNP phosphoramidite base
  misc_feature (2)..(2): n is a, c, g, or t
  modified_base (23)..(23): DNP phosphoramidite base
  misc_feature (23)..(23): n is a, c, g, or t
  modified_base (44)..(44): DNP phosphoramidite base
  misc_feature (44)..(44): n is a, c, g, or t
  modified_base (65)..(65): DNP phosphoramidite base
  misc_feature (65)..(65): n is a, c, g, or t
  modified_base (86)..(86): DNP phosphoramidite base
  misc_feature (86)..(86): n is a, c, g, or t
tnactctctcacctttcattganaatttttattatggcttaagntttttaaacgaattatgaatnggcagtactcctcaaaaaccnt

SEQ ID NO: 811 - DNA, 87 bp, Artificial Sequence
  Synthetic Probe
  modified_base (2)..(2): DNP phosphoramidite base
  misc_feature (2)..(2): n is a, c, g, or t
  modified_base (23)..(23): DNP phosphoramidite base
  misc_feature (23)..(23): n is a, c, g, or t
  modified_base (44)..(44): DNP phosphoramidite base
  misc_feature (44)..(44): n is a, c, g, or t
  modified_base (65)..(65): DNP phosphoramidite base
  misc_feature (65)..(65): n is a, c, g, or t
  modified_base (86)..(86): DNP phosphoramidite base
  misc_feature (86)..(86): n is a, c, g, or t
tnactagatggcagcaaacaatngagaagggccaaatacataanaaggaaacacatgggtaccancataaatattgaaacactggnt

SEQ ID NO: 812 - DNA, 87 bp, Artificial Sequence
  Synthetic Probe
  modified_base (2)..(2): DNP phosphoramidite base
  misc_feature (2)..(2): n is a, c, g, or t
  modified_base (23)..(23): DNP phosphoramidite base
  misc_feature (23)..(23): n is a, c, g, or t
  modified_base (44)..(44): DNP phosphoramidite base
  misc_feature (44)..(44): n is a, c, g, or t
  modified_base (65)..(65): DNP phosphoramidite base
  misc_feature (65)..(65): n is a, c, g, or t
  modified_base (86)..(86): DNP phosphoramidite base
  misc_feature (86)..(86): n is a, c, g, or t
tnaaataaagcttcatcttcacntgactcttgaacatttttcanagatttgtcattaattatttnctttatccaataaacattgant

SEQ ID NO: 813 - DNA, 87 bp, Artificial Sequence
  Synthetic Probe
  modified_base (2)..(2): DNP phosphoramidite base
  misc_feature (2)..(2): n is a, c, g, or t
  modified_base (23)..(23): DNP phosphoramidite base
  misc_feature (23)..(23): n is a, c, g, or t
  modified_base (44)..(44): DNP phosphoramidite base
  misc_feature (44)..(44): n is a, c, g, or t
  modified_base (65)..(65): DNP phosphoramidite base
  misc_feature (65)..(65): n is a, c, g, or t
  modified_base (86)..(86): DNP phosphoramidite base
  misc_feature (86)..(86): n is a, c, g, or t
tnttgacaataaattaaacattngatagattattaaacaaaganctataacgaagtgctatgagnagtatttcttctgctgatttnt

SEQ ID NO: 814 - DNA, 87 bp, Artificial Sequence
  Synthetic Probe
  modified_base (2)..(2): DNP phosphoramidite base
  misc_feature (2)..(2): n is a, c, g, or t
  modified_base (23)..(23): DNP phosphoramidite base
  misc_feature (23)..(23): n is a, c, g, or t
  modified_base (44)..(44): DNP phosphoramidite base
  misc_feature (44)..(44): n is a, c, g, or t
  modified_base (65)..(65): DNP phosphoramidite base
  misc_feature (65)..(65): n is a, c, g, or t
  modified_base (86)..(86): DNP phosphoramidite base
  misc_feature (86)..(86): n is a, c, g, or t
tnatttttgtctttgaagactcncatgttttcccacacaacttntgatacatagcaagtcctcangattttacactcagctacttnt

SEQ ID NO: 815 - DNA, 87 bp, Artificial Sequence
  Synthetic Probe
  modified_base (2)..(2): DNP phosphoramidite base
  misc_feature (2)..(2): n is a, c, g, or t
  modified_base (23)..(23): DNP phosphoramidite base
  misc_feature (23)..(23): n is a, c, g, or t
  modified_base (44)..(44): DNP phosphoramidite base
  misc_feature (44)..(44): n is a, c, g, or t
  modified_base (65)..(65): DNP phosphoramidite base
  misc_feature (65)..(65): n is a, c, g, or t
  modified_base (86)..(86): DNP phosphoramidite base
  misc_feature (86)..(86): n is a, c, g, or t
tnactagtctccaatcataatanatacactctcatatctctgtnagtttgcatatgttatttctncacatgtggaaagatgcccant

SEQ ID NO: 816 - DNA, 87 bp, Artificial Sequence
  Synthetic Probe
  modified_base (2)..(2): DNP phosphoramidite base
  misc_feature (2)..(2): n is a, c, g, or t
  modified_base (23)..(23): DNP phosphoramidite base
  misc_feature (23)..(23): n is a, c, g, or t
  modified_base (44)..(44): DNP phosphoramidite base
  misc_feature (44)..(44): n is a, c, g, or t
  modified_base (65)..(65): DNP phosphoramidite base
  misc_feature (65)..(65): n is a, c, g, or t
  modified_base (86)..(86): DNP phosphoramidite base
  misc_feature (86)..(86): n is a, c, g, or t
tntttattatttttttaaagaancttgtgattatgtcttctganataaggcacaatgtgatcagntccacacaggcataaattgant

SEQ ID NO: 817 - DNA, 87 bp, Artificial Sequence
  Synthetic Probe
  modified_base (2)..(2): DNP phosphoramidite base
  misc_feature (2)..(2): n is a, c, g, or t
  modified_base (23)..(23): DNP phosphoramidite base
  misc_feature (23)..(23): n is a, c, g, or t
  modified_base (44)..(44): DNP phosphoramidite base
  misc_feature (44)..(44): n is a, c, g, or t
  modified_base (65)..(65): DNP phosphoramidite base
  misc_feature (65)..(65): n is a, c, g, or t
  modified_base (86)..(86): DNP phosphoramidite base
  misc_feature (86)..(86): n is a, c, g, or t
tnagaaacaaatatactacacgntacgctgtcctaggatgacancaacaccctcactactgcagnaagacggatcattaaacaaant

SEQ ID NO: 818 - DNA, 87 bp, Artificial Sequence
  Synthetic Probe
  modified_base (2)..(2): DNP phosphoramidite base
  misc_feature (2)..(2): n is a, c, g, or t
  modified_base (23)..(23): DNP phosphoramidite base
  misc_feature (23)..(23): n is a, c, g, or t
  modified_base (44)..(44): DNP phosphoramidite base
  misc_feature (44)..(44): n is a, c, g, or t
  modified_base (65)..(65): DNP phosphoramidite base
  misc_feature (65)..(65): n is a, c, g, or t
  modified_base (86)..(86): DNP phosphoramidite base
  misc_feature (86)..(86): n is a, c, g, or t
tntgcccactccctgctcctccntcgcctcaatttcgcttccgncttctttgcgcatctgcttcncgggggattgtaggctctgcnt

SEQ ID NO: 819 - DNA, 87 bp, Artificial Sequence
  Synthetic Probe
  modified_base (2)..(2): DNP phosphoramidite base
  misc_feature (2)..(2): n is a, c, g, or t
  modified_base (23)..(23): DNP phosphoramidite base
  misc_feature (23)..(23): n is a, c, g, or t
  modified_base (44)..(44): DNP phosphoramidite base
  misc_feature (44)..(44): n is a, c, g, or t
  modified_base (65)..(65): DNP phosphoramidite base
  misc_feature (65)..(65): n is a, c, g, or t
  modified_base (86)..(86): DNP phosphoramidite base
  misc_feature (86)..(86): n is a, c, g, or t
tncttctgccggaggaggggggngggccgagggggtggggaagnagttcgttgtttgtttacacngatgtgagcggaaaaagagant

SEQ ID NO: 820 - DNA, 87 bp, Artificial Sequence
  Synthetic Probe
  modified_base (2)..(2): DNP phosphoramidite base
  misc_feature (2)..(2): n is a, c, g, or t
  modified_base (23)..(23): DNP phosphoramidite base
  misc_feature (23)..(23): n is a, c, g, or t
  modified_base (44)..(44): DNP phosphoramidite base
  misc_feature (44)..(44): n is a, c, g, or t
  modified_base (65)..(65): DNP phosphoramidite base
  misc_feature (65)..(65): n is a, c, g, or t
  modified_base (86)..(86): DNP phosphoramidite base
  misc_feature (86)..(86): n is a, c, g, or t
tngaaggaacaccgctcccctcnacccccgccagctcccctccncacccttcctttcgaggttgnttttttccttttagctgagant

SEQ ID NO: 821 - DNA, 87 bp, Artificial Sequence
  Synthetic Probe
  modified_base (2)..(2): DNP phosphoramidite base
  misc_feature (2)..(2): n is a, c, g, or t
  modified_base (23)..(23): DNP phosphoramidite base
  misc_feature (23)..(23): n is a, c, g, or t
  modified_base (44)..(44): DNP phosphoramidite base
  misc_feature (44)..(44): n is a, c, g, or t
  modified_base (65)..(65): DNP phosphoramidite base
  misc_feature (65)..(65): n is a, c, g, or t
  modified_base (86)..(86): DNP phosphoramidite base
  misc_feature (86)..(86): n is a, c, g, or t
tntggctcttaagtggctcgganaaggtagggtagggcccgggnattgggctatgtaaacaccangacgttcagccggcgtgtttnt

SEQ ID NO: 822 - DNA, 87 bp, Artificial Sequence
  Synthetic Probe
  modified_base (2)..(2): DNP phosphoramidite base
  misc_feature (2)..(2): n is a, c, g, or t
  modified_base (23)..(23): DNP phosphoramidite base
  misc_feature (23)..(23): n is a, c, g, or t
  modified_base (44)..(44): DNP phosphoramidite base
  misc_feature (44)..(44): n is a, c, g, or t
  modified_base (65)..(65): DNP phosphoramidite base
  misc_feature (65)..(65): n is a, c, g, or t
  modified_base (86)..(86): DNP phosphoramidite base
  misc_feature (86)..(86): n is a, c, g, or t
tnaaagggagcgcaacaagaggngtctttctagaaaacagtctngcatattctttaatgaattangagttgtgatttcatcttggnt

SEQ ID NO: 823 - DNA, 87 bp, Artificial Sequence
  Synthetic Probe
  modified_base (2)..(2): DNP phosphoramidite base
  misc_feature (2)..(2): n is a, c, g, or t
  modified_base (23)..(23): DNP phosphoramidite base
  misc_feature (23)..(23): n is a, c, g, or t
  modified_base (44)..(44): DNP phosphoramidite base
  misc_feature (44)..(44): n is a, c, g, or t
  modified_base (65)..(65): DNP phosphoramidite base
  misc_feature (65)..(65): n is a, c, g, or t
  modified_base (86)..(86): DNP phosphoramidite base
  misc_feature (86)..(86): n is a, c, g, or t
tnacactttgctttcaaagcaanctacagtcttaacaatttaancgtgtctttgtattcaggttnttaagtttttggtgttttttnt

SEQ ID NO: 824 - DNA, 87 bp, Artificial Sequence
  Synthetic Probe
  modified_base (2)..(2): DNP phosphoramidite base
  misc_feature (2)..(2): n is a, c, g, or t
  modified_base (23)..(23): DNP phosphoramidite base
  misc_feature (23)..(23): n is a, c, g, or t
  modified_base (44)..(44): DNP phosphoramidite base
  misc_feature (44)..(44): n is a, c, g, or t
  modified_base (65)..(65): DNP phosphoramidite base
  misc_feature (65)..(65): n is a, c, g, or t
  modified_base (86)..(86): DNP phosphoramidite base
  misc_feature (86)..(86): n is a, c, g, or t
tnaaagttttaaagacattcctngtcagttttaaataattaaanaatgaaacacctgtaaatatnagaagagtgtttttatttaant

SEQ ID NO: 825 - DNA, 87 bp, Artificial Sequence
  Synthetic Probe
  modified_base (2)..(2): DNP phosphoramidite base
  misc_feature (2)..(2): n is a, c, g, or t
  modified_base (23)..(23): DNP phosphoramidite base
  misc_feature (23)..(23): n is a, c, g, or t
  modified_base (44)..(44): DNP phosphoramidite base
  misc_feature (44)..(44): n is a, c, g, or t
  modified_base (65)..(65): DNP phosphoramidite base
  misc_feature (65)..(65): n is a, c, g, or t
  modified_base (86)..(86): DNP phosphoramidite base
  misc_feature (86)..(86): n is a, c, g, or t
tnaaaatggcttcatggaagtgntaaattgtcatgggccttgantatatttaaaagggagactanaaagtgcagtggttttgcttnt

SEQ ID NO: 826 - DNA, 87 bp, Artificial Sequence
  Synthetic Probe
  modified_base (2)..(2): DNP phosphoramidite base
  misc_feature (2)..(2): n is a, c, g, or t
  modified_base (23)..(23): DNP phosphoramidite base
  misc_feature (23)..(23): n is a, c, g, or t
  modified_base (44)..(44): DNP phosphoramidite base
  misc_feature (44)..(44): n is a, c, g, or t
  modified_base (65)..(65): DNP phosphoramidite base
  misc_feature (65)..(65): n is a, c, g, or t
  modified_base (86)..(86): DNP phosphoramidite base
  misc_feature (86)..(86): n is a, c, g, or t
tnaaaccaaagaaaaaacccaanacttataaataatgcacaacnataaagtagactgtaataacntttttctctaaaccagtttant

SEQ ID NO: 827 - DNA, 87 bp, Artificial Sequence
  Synthetic Probe
  modified_base (2)..(2): DNP phosphoramidite base
  misc_feature (2)..(2): n is a, c, g, or t
  modified_base (23)..(23): DNP phosphoramidite base
  misc_feature (23)..(23): n is a, c, g, or t
  modified_base (44)..(44): DNP phosphoramidite base
  misc_feature (44)..(44): n is a, c, g, or t
  modified_base (65)..(65): DNP phosphoramidite base
  misc_feature (65)..(65): n is a, c, g, or t
  modified_base (86)..(86): DNP phosphoramidite base
  misc_feature (86)..(86): n is a, c, g, or t
tngaataaagagttttaaacagnttacgattaccatttaaaggngcacttgctctgttgatctgntttatttgaagagaggtaacnt

SEQ ID NO: 828 - DNA, 87 bp, Artificial Sequence
  Synthetic Probe
  modified_base (2)..(2): DNP phosphoramidite base
  misc_feature (2)..(2): n is a, c, g, or t
  modified_base (23)..(23): DNP phosphoramidite base
  misc_feature (23)..(23): n is a, c, g, or t
  modified_base (44)..(44): DNP phosphoramidite base
  misc_feature (44)..(44): n is a, c, g, or t
  modified_base (65)..(65): DNP phosphoramidite base
  misc_feature (65)..(65): n is a, c, g, or t
  modified_base (86)..(86): DNP phosphoramidite base
  misc_feature (86)..(86): n is a, c, g, or t
tnttaatcccatttgatctcttngagcagctacagtagcattanaaaggatcagttctctatttntgttattttatatcttgaatnt

SEQ ID NO: 829 - DNA, 87 bp, Artificial Sequence
  Synthetic Probe
  modified_base (2)..(2): DNP phosphoramidite base
  misc_feature (2)..(2): n is a, c, g, or t
  modified_base (23)..(23): DNP phosphoramidite base
  misc_feature (23)..(23): n is a, c, g, or t
  modified_base (44)..(44): DNP phosphoramidite base
  misc_feature (44)..(44): n is a, c, g, or t
  modified_base (65)..(65): DNP phosphoramidite base
  misc_feature (65)..(65): n is a, c, g, or t
  modified_base (86)..(86): DNP phosphoramidite base
  misc_feature (86)..(86): n is a, c, g, or t
tngggtgattctttaaatgaagntgtttcttaagcattataaanatatttcatctccagtgaaangtatttacaatcttaaaaatnt

SEQ ID NO: 830 - DNA, 87 bp, Artificial Sequence
  Synthetic Probe
  modified_base (2)..(2): DNP phosphoramidite base
  misc_feature (2)..(2): n is a, c, g, or t
  modified_base (23)..(23): DNP phosphoramidite base
  misc_feature (23)..(23): n is a, c, g, or t
  modified_base (44)..(44): DNP phosphoramidite base
  misc_feature (44)..(44): n is a, c, g, or t
  modified_base (65)..(65): DNP phosphoramidite base
  misc_feature (65)..(65): n is a, c, g, or t
  modified_base (86)..(86): DNP phosphoramidite base
  misc_feature (86)..(86): n is a, c, g, or t
tntggtttacattttattagcancagttatcaaatagtttttcnttaagtattaccttgagctantattaacagtgccgtagacant

SEQ ID NO: 831 - DNA, 87 bp, Artificial Sequence
  Synthetic Probe
  modified_base (2)..(2): DNP phosphoramidite base
  misc_feature (2)..(2): n is a, c, g, or t
  modified_base (23)..(23): DNP phosphoramidite base
  misc_feature (23)..(23): n is a, c, g, or t
  modified_base (44)..(44): DNP phosphoramidite base
  misc_feature (44)..(44): n is a, c, g, or t
  modified_base (65)..(65): DNP phosphoramidite base
  misc_feature (65)..(65): n is a, c, g, or t
  modified_base (86)..(86): DNP phosphoramidite base
  misc_feature (86)..(86): n is a, c, g, or t
tnggttgtgttttagcaactttntgtacattattgcgattgttnacaaaggggtctttatgatgngctagcattgccatttgaaant

SEQ ID NO: 832 - DNA, 87 bp, Artificial Sequence
  Synthetic Probe
  modified_base (2)..(2): DNP phosphoramidite base
  misc_feature (2)..(2): n is a, c, g, or t
  modified_base (23)..(23): DNP phosphoramidite base
  misc_feature (23)..(23): n is a, c, g, or t
  modified_base (44)..(44): DNP phosphoramidite base
  misc_feature (44)..(44): n is a, c, g, or t
  modified_base (65)..(65): DNP phosphoramidite base
  misc_feature (65)..(65): n is a, c, g, or t
  modified_base (86)..(86): DNP phosphoramidite base
  misc_feature (86)..(86): n is a, c, g, or t
tnttcggattttaagtatttgtnatagtaaagccaaggaaatcnagtgttgtgatgtgaagaaanaaaactgtatagggatagaant

SEQ ID NO: 833 - DNA, 87 bp, Artificial Sequence
  Synthetic Probe
  modified_base (2)..(2): DNP phosphoramidite base
  misc_feature (2)..(2): n is a, c, g, or t
  modified_base (23)..(23): DNP phosphoramidite base
  misc_feature (23)..(23): n is a, c, g, or t
  modified_base (44)..(44): DNP phosphoramidite base
  misc_feature (44)..(44): n is a, c, g, or t
  modified_base (65)..(65): DNP phosphoramidite base
  misc_feature (65)..(65): n is a, c, g, or t
  modified_base (86)..(86): DNP phosphoramidite base
  misc_feature (86)..(86): n is a, c, g, or t
tnttagtggacgaatatgtcttnataagtacaacaaaaatatanaggcactattatgaagagganttttaggcatatgtttttgant

SEQ ID NO: 834 - DNA, 87 bp, Artificial Sequence
  Synthetic Probe
  modified_base (2)..(2): DNP phosphoramidite base
  misc_feature (2)..(2): n is a, c, g, or t
  modified_base (23)..(23): DNP phosphoramidite base
  misc_feature (23)..(23): n is a, c, g, or t
  modified_base (44)..(44): DNP phosphoramidite base
  misc_feature (44)..(44): n is a, c, g, or t
  modified_base (65)..(65): DNP phosphoramidite base
  misc_feature (65)..(65): n is a, c, g, or t
  modified_base (86)..(86): DNP phosphoramidite base
  misc_feature (86)..(86): n is a, c, g, or t
tntatttagaaataaaaatactnttcttatatttctatcaggangccatacgctttatctgaaanagcaggtaaattgctgtgtgnt

SEQ ID NO: 835 - DNA, 87 bp, Artificial Sequence
  Synthetic Probe
  modified_base (2)..(2): DNP phosphoramidite base
  misc_feature (2)..(2): n is a, c, g, or t
  modified_base (23)..(23): DNP phosphoramidite base
  misc_feature (23)..(23): n is a, c, g, or t
  modified_base (44)..(44): DNP phosphoramidite base
  misc_feature (44)..(44): n is a, c, g, or t
  modified_base (65)..(65): DNP phosphoramidite base
  misc_feature (65)..(65): n is a, c, g, or t
  modified_base (86)..(86): DNP phosphoramidite base
  misc_feature (86)..(86): n is a, c, g, or t
tnttttcagttctttacaatacntgcttgctttttattcgttanaaacttttaaaatttcattcntagctctaggaatctgaatgnt

SEQ ID NO: 836 - DNA, 87 bp, Artificial Sequence
  Synthetic Probe
  modified_base (2)..(2): DNP phosphoramidite base
  misc_feature (2)..(2): n is a, c, g, or t
  modified_base (23)..(23): DNP phosphoramidite base
  misc_feature (23)..(23): n is a, c, g, or t
  modified_base (44)..(44): DNP phosphoramidite base
  misc_feature (44)..(44): n is a, c, g, or t
  modified_base (65)..(65): DNP phosphoramidite base
  misc_feature (65)..(65): n is a, c, g, or t
  modified_base (86)..(86): DNP phosphoramidite base
  misc_feature (86)..(86): n is a, c, g, or t
tncctactcctaagggaagttangcatatggatatttagtttanataggaatgaggaattaatgngacagaaggtattaagtaagnt

SEQ ID NO: 837 - DNA, 87 bp, Artificial Sequence
  Synthetic Probe
  modified_base (2)..(2): DNP phosphoramidite base
  misc_feature (2)..(2): n is a, c, g, or t
  modified_base (23)..(23): DNP phosphoramidite base
  misc_feature (23)..(23): n is a, c, g, or t
  modified_base (44)..(44): DNP phosphoramidite base
  misc_feature (44)..(44): n is a, c, g, or t
  modified_base (65)..(65): DNP phosphoramidite base
  misc_feature (65)..(65): n is a, c, g, or t
  modified_base (86)..(86): DNP phosphoramidite base
  misc_feature (86)..(86): n is a, c, g, or t
tntgtctttttttcatgcactanaagacaagagttgtgtcgtanttgtcacatagtccttatatntacagggcttttaaagaaatnt

SEQ ID NO: 838 - DNA, 87 bp, Artificial Sequence
  Synthetic Probe
  modified_base (2)..(2): DNP phosphoramidite base
  misc_feature (2)..(2): n is a, c, g, or t
  modified_base (23)..(23): DNP phosphoramidite base
  misc_feature (23)..(23): n is a, c, g, or t
  modified_base (44)..(44): DNP phosphoramidite base
  misc_feature (44)..(44): n is a, c, g, or t
  modified_base (65)..(65): DNP phosphoramidite base
  misc_feature (65)..(65): n is a, c, g, or t
  modified_base (86)..(86): DNP phosphoramidite base
  misc_feature (86)..(86): n is a, c, g, or t
tnggacactcaatggacatgtgntaaactttacaagtcatttantgtaaaaataaggaaagcaanccatgtgttttaattatttcnt

SEQ ID NO: 839 - DNA, 87 bp, Artificial Sequence
  Synthetic Probe
  modified_base (2)..(2): DNP phosphoramidite base
  misc_feature (2)..(2): n is a, c, g, or t
  modified_base (23)..(23): DNP phosphoramidite base
  misc_feature (23)..(23): n is a, c, g, or t
  modified_base (44)..(44): DNP phosphoramidite base
  misc_feature (44)..(44): n is a, c, g, or t
  modified_base (65)..(65): DNP phosphoramidite base
  misc_feature (65)..(65): n is a, c, g, or t
  modified_base (86)..(86): DNP phosphoramidite base
  misc_feature (86)..(86): n is a, c, g, or t
tntctgtatttctcatataccanggataatagtaaaatctacancactttaaaaaactacatatngttgttgttaacatatatggnt

SEQ ID NO: 840 - DNA, 87 bp, Artificial Sequence
  Synthetic Probe
  modified_base (2)..(2): DNP phosphoramidite base
  misc_feature (2)..(2): n is a, c, g, or t
  modified_base (23)..(23): DNP phosphoramidite base
  misc_feature (23)..(23): n is a, c, g, or t
  modified_base (44)..(44): DNP phosphoramidite base
  misc_feature (44)..(44): n is a, c, g, or t
  modified_base (65)..(65): DNP phosphoramidite base
  misc_feature (65)..(65): n is a, c, g, or t
  modified_base (86)..(86): DNP phosphoramidite base
  misc_feature (86)..(86): n is a, c, g, or t
tnaggtttcttcagaaattatcntgcgatttttgttgtaattgnttttcattgttgtgtgctttntaaagaatgacttttattaant

SEQ ID NO: 841 - DNA, 87 bp, Artificial Sequence
  Synthetic Probe
  modified_base (2)..(2): DNP phosphoramidite base
  misc_feature (2)..(2): n is a, c, g, or t
  modified_base (23)..(23): DNP phosphoramidite base
  misc_feature (23)..(23): n is a, c, g, or t
  modified_base (44)..(44): DNP phosphoramidite base
  misc_feature (44)..(44): n is a, c, g, or t
  modified_base (65)..(65): DNP phosphoramidite base
  misc_feature (65)..(65): n is a, c, g, or t
  modified_base (86)..(86): DNP phosphoramidite base
  misc_feature (86)..(86): n is a, c, g, or t
tnatgtacaatgaaaaaataacnatgacattggattgccctggnggctgaccaagagtttgtttnccatagtaagggattatgacnt

SEQ ID NO: 842 - DNA, 87 bp, Artificial Sequence
  Synthetic Probe
  modified_base (2)..(2): DNP phosphoramidite base
  misc_feature (2)..(2): n is a, c, g, or t
  modified_base (23)..(23): DNP phosphoramidite base
  misc_feature (23)..(23): n is a, c, g, or t
  modified_base (44)..(44): DNP phosphoramidite base
  misc_feature (44)..(44): n is a, c, g, or t
  modified_base (65)..(65): DNP phosphoramidite base
  misc_feature (65)..(65): n is a, c, g, or t
  modified_base (86)..(86): DNP phosphoramidite base
  misc_feature (86)..(86): n is a, c, g, or t
tntaatttaggcattgaagttanagaatttattacttatttttnaaatgacatcacgaagagttnacagctgaaacccatggaagnt

SEQ ID NO: 843 - DNA, 87 bp, Artificial Sequence
  Synthetic Probe
  modified_base (2)..(2): DNP phosphoramidite base
  misc_feature (2)..(2): n is a, c, g, or t
  modified_base (23)..(23): DNP phosphoramidite base
  misc_feature (23)..(23): n is a, c, g, or t
  modified_base (44)..(44): DNP phosphoramidite base
  misc_feature (44)..(44): n is a, c, g, or t
  modified_base (65)..(65): DNP phosphoramidite base
  misc_feature (65)..(65): n is a, c, g, or t
  modified_base (86)..(86): DNP phosphoramidite base
  misc_feature (86)..(86): n is a, c, g, or t
tnttctatatgtacacacaaatngtgtattttgaattcccatanaacccaaactttaatataaancctgaggagggggagcattant

SEQ ID NO: 844 - DNA, 87 bp, Artificial Sequence
  Synthetic Probe
  modified_base (2)..(2): DNP phosphoramidite base
  misc_feature (2)..(2): n is a, c, g, or t
  modified_base (23)..(23): DNP phosphoramidite base
  misc_feature (23)..(23): n is a, c, g, or t
  modified_base (44)..(44): DNP phosphoramidite base
  misc_feature (44)..(44): n is a, c, g, or t
  modified_base (65)..(65): DNP phosphoramidite base
  misc_feature (65)..(65): n is a, c, g, or t
  modified_base (86)..(86): DNP phosphoramidite base
  misc_feature (86)..(86): n is a, c, g, or t
tnctctttgatatacacacgtgntgcaccccacatgtaagcctntcacccttcttaattctatgntatattttatatattgtgtant

SEQ ID NO: 845 - DNA, 87 bp, Artificial Sequence
  Synthetic Probe
  modified_base (2)..(2): DNP phosphoramidite base
  misc_feature (2)..(2): n is a, c, g, or t
  modified_base (23)..(23): DNP phosphoramidite base
  misc_feature (23)..(23): n is a, c, g, or t
  modified_base (44)..(44): DNP phosphoramidite base
  misc_feature (44)..(44): n is a, c, g, or t
  modified_base (65)..(65): DNP phosphoramidite base
  misc_feature (65)..(65): n is a, c, g, or t
  modified_base (86)..(86): DNP phosphoramidite base
  misc_feature (86)..(86): n is a, c, g, or t
tnaaccacatacattatactttnatggatgacttgagatttttncaagaaaaatgtcgattctgntacaatcatagactctgtttnt

SEQ ID NO: 846 - DNA, 87 bp, Artificial Sequence
  Synthetic Probe
  modified_base (2)..(2): DNP phosphoramidite base
  misc_feature (2)..(2): n is a, c, g, or t
  modified_base (23)..(23): DNP phosphoramidite base
  misc_feature (23)..(23): n is a, c, g, or t
  modified_base (44)..(44): DNP phosphoramidite base
  misc_feature (44)..(44): n is a, c, g, or t
  modified_base (65)..(65): DNP phosphoramidite base
  misc_feature (65)..(65): n is a, c, g, or t
  modified_base (86)..(86): DNP phosphoramidite base
  misc_feature (86)..(86): n is a, c, g, or t
tngcaaattactattatggttcntgatctagaattataagcaanacgtgctgtttcattgcatcnagaccttcccttcttcctcgnt

SEQ ID NO: 847 - DNA, 87 bp, Artificial Sequence
  Synthetic Probe
  modified_base (2)..(2): DNP phosphoramidite base
  misc_feature (2)..(2): n is a, c, g, or t
  modified_base (23)..(23): DNP phosphoramidite base
  misc_feature (23)..(23): n is a, c, g, or t
  modified_base (44)..(44): DNP phosphoramidite base
  misc_feature (44)..(44): n is a, c, g, or t
  modified_base (65)..(65): DNP phosphoramidite base
  misc_feature (65)..(65): n is a, c, g, or t
  modified_base (86)..(86): DNP phosphoramidite base
  misc_feature (86)..(86): n is a, c, g, or t
tnctgccaatatttctggaactngaaaccaagaaaatggaaatntagggcaccacactttgaaantgtattaaacacttgaaaaant

SEQ ID NO: 848 - DNA, 87 bp, Artificial Sequence
  Synthetic Probe
  modified_base (2)..(2): DNP phosphoramidite base
  misc_feature (2)..(2): n is a, c, g, or t
  modified_base (23)..(23): DNP phosphoramidite base
  misc_feature (23)..(23): n is a, c, g, or t
  modified_base (44)..(44): DNP phosphoramidite base
  misc_feature (44)..(44): n is a, c, g, or t
  modified_base (65)..(65): DNP phosphoramidite base
  misc_feature (65)..(65): n is a, c, g, or t
  modified_base (86)..(86): DNP phosphoramidite base
  misc_feature (86)..(86): n is a, c, g, or t
tnttctcaaaataacaagaagtntttgccttgatttttgttttntgaatttagcaaaatattcanaaagttcatctggaattatcnt

SEQ ID NO: 849 - DNA, 87 bp, Artificial Sequence
  Synthetic Probe
  modified_base (2)..(2): DNP phosphoramidite base
  misc_feature (2)..(2): n is a, c, g, or t
  modified_base (23)..(23): DNP phosphoramidite base
  misc_feature (23)..(23): n is a, c, g, or t
  modified_base (44)..(44): DNP phosphoramidite base
  misc_feature (44)..(44): n is a, c, g, or t
  modified_base (65)..(65): DNP phosphoramidite base
  misc_feature (65)..(65): n is a, c, g, or t
  modified_base (86)..(86): DNP phosphoramidite base
  misc_feature (86)..(86): n is a, c, g, or t
tnaataagactgtgaagggactnttacagaagctacttgggctngaatttaaaggatgagtatgnattaaaatggcaataaatgtnt

SEQ ID NO: 850 - DNA, 87 bp, Artificial Sequence
  Synthetic Probe
  modified_base (2)..(2): DNP phosphoramidite base
  misc_feature (2)..(2): n is a, c, g, or t
  modified_base (23)..(23): DNP phosphoramidite base
  misc_feature (23)..(23): n is a, c, g, or t
  modified_base (44)..(44): DNP phosphoramidite base
  misc_feature (44)..(44): n is a, c, g, or t
  modified_base (65)..(65): DNP phosphoramidite base
  misc_feature (65)..(65): n is a, c, g, or t
  modified_base (86)..(86): DNP phosphoramidite base
  misc_feature (86)..(86): n is a, c, g, or t
tnggagtgtgggaaaaataagangaagagcacagttgtaatgtnttgaggcttgagtcaaggctngtattgcatagttactagagnt

SEQ ID NO: 851 - DNA, 87 bp, Artificial Sequence
  Synthetic Probe
  modified_base (2)..(2): DNP phosphoramidite base
  misc_feature (2)..(2): n is a, c, g, or t
  modified_base (23)..(23): DNP phosphoramidite base
  misc_feature (23)..(23): n is a, c, g, or t
  modified_base (44)..(44): DNP phosphoramidite base
  misc_feature (44)..(44): n is a, c, g, or t
  modified_base (65)..(65): DNP phosphoramidite base
  misc_feature (65)..(65): n is a, c, g, or t
  modified_base (86)..(86): DNP phosphoramidite base
  misc_feature (86)..(86): n is a, c, g, or t
tnatccacaatattgtcttaatntgagtaatggtgtaattagantatatgtttttagatagccanattctagtgacactgtagatnt

SEQ ID NO: 852 - DNA, 87 bp, Artificial Sequence
  Synthetic Probe
  modified_base (2)..(2): DNP phosphoramidite base
  misc_feature (2)..(2): n is a, c, g, or t
  modified_base (23)..(23): DNP phosphoramidite base
  misc_feature (23)..(23): n is a, c, g, or t
  modified_base (44)..(44): DNP phosphoramidite base
  misc_feature (44)..(44): n is a, c, g, or t
  modified_base (65)..(65): DNP phosphoramidite base
  misc_feature (65)..(65): n is a, c, g, or t
  modified_base (86)..(86): DNP phosphoramidite base
  misc_feature (86)..(86): n is a, c, g, or t
tntgccttgtagattgttagatnaataaggtcttttcaacctcnatttatatacttcatttatantacttgtatgagtgtttttcnt

SEQ ID NO: 853 - DNA, 87 bp, Artificial Sequence
  Synthetic Probe
  modified_base (2)..(2): DNP phosphoramidite base
  misc_feature (2)..(2): n is a, c, g, or t
  modified_base (23)..(23): DNP phosphoramidite base
  misc_feature (23)..(23): n is a, c, g, or t
  modified_base (44)..(44): DNP phosphoramidite base
  misc_feature (44)..(44): n is a, c, g, or t
  modified_base (65)..(65): DNP phosphoramidite base
  misc_feature (65)..(65): n is a, c, g, or t
  modified_base (86)..(86): DNP phosphoramidite base
  misc_feature (86)..(86): n is a, c, g, or t
tngttgaattagagacagatcangtcctgcatatgagaactctntttagggtctaatagtgatangagaagattgaaaaaaaaagnt

SEQ ID NO: 854 - DNA, 87 bp, Artificial Sequence
  Synthetic Probe
  modified_base (2)..(2): DNP phosphoramidite base
  misc_feature (2)..(2): n is a, c, g, or t
  modified_base (23)..(23): DNP phosphoramidite base
  misc_feature (23)..(23): n is a, c, g, or t
  modified_base (44)..(44): DNP phosphoramidite base
  misc_feature (44)..(44): n is a, c, g, or t
  modified_base (65)..(65): DNP phosphoramidite base
  misc_feature (65)..(65): n is a, c, g, or t
  modified_base (86)..(86): DNP phosphoramidite base
  misc_feature (86)..(86): n is a, c, g, or t
tnacatatgtggatgcaattagngtgaatatattgtatctgctnggtgtccccaaagttgatagnctttatttattggaccagccnt

SEQ ID NO: 855 - DNA, 87 bp, Artificial Sequence
  Synthetic Probe
  modified_base (2)..(2): DNP phosphoramidite base
  misc_feature (2)..(2): n is a, c, g, or t
  modified_base (23)..(23): DNP phosphoramidite base
  misc_feature (23)..(23): n is a, c, g, or t
  modified_base (44)..(44): DNP phosphoramidite base
  misc_feature (44)..(44): n is a, c, g, or t
  modified_base (65)..(65): DNP phosphoramidite base
  misc_feature (65)..(65): n is a, c, g, or t
  modified_base (86)..(86): DNP phosphoramidite base
  misc_feature (86)..(86): n is a, c, g, or t
tnatgaaagactcatctcttctntcattctcaagacaatagggnctaatcagtgagatgcaggcnaagttttaatttatctaaatnt

SEQ ID NO: 856 - DNA, 87 bp, Artificial Sequence
  Synthetic Probe
  modified_base (2)..(2): DNP phosphoramidite base
  misc_feature (2)..(2): n is a, c, g, or t
  modified_base (23)..(23): DNP phosphoramidite base
  misc_feature (23)..(23): n is a, c, g, or t
  modified_base (44)..(44): DNP phosphoramidite base
  misc_feature (44)..(44): n is a, c, g, or t
  modified_base (65)..(65): DNP phosphoramidite base
  misc_feature (65)..(65): n is a, c, g, or t
  modified_base (86)..(86): DNP phosphoramidite base
  misc_feature (86)..(86): n is a, c, g, or t
tnttttttttcctaatttaaaanaattaccctctatatgataanccaaatttcctttaagtgttngcttcagtgaaccaaatagtnt

SEQ ID NO: 857 - DNA, 87 bp, Artificial Sequence
  Synthetic Probe
  modified_base (2)..(2): DNP phosphoramidite base
  misc_feature (2)..(2): n is a, c, g, or t
  modified_base (23)..(23): DNP phosphoramidite base
  misc_feature (23)..(23): n is a, c, g, or t
  modified_base (44)..(44): DNP phosphoramidite base
  misc_feature (44)..(44): n is a, c, g, or t
  modified_base (65)..(65): DNP phosphoramidite base
  misc_feature (65)..(65): n is a, c, g, or t
  modified_base (86)..(86): DNP phosphoramidite base
  misc_feature (86)..(86): n is a, c, g, or t
tngtgtaggagttctagctagantaatatctaccatctctttancaacaagcctgaaacagtaangttctgtttccctttctggant

SEQ ID NO: 858 - DNA, 87 bp, Artificial Sequence
  Synthetic Probe
  modified_base (2)..(2): DNP phosphoramidite base
  misc_feature (2)..(2): n is a, c, g, or t
  modified_base (23)..(23): DNP phosphoramidite base
  misc_feature (23)..(23): n is a, c, g, or t
  modified_base (44)..(44): DNP phosphoramidite base
  misc_feature (44)..(44): n is a, c, g, or t
  modified_base (65)..(65): DNP phosphoramidite base
  misc_feature (65)..(65): n is a, c, g, or t
  modified_base (86)..(86): DNP phosphoramidite base
  misc_feature (86)..(86): n is a, c, g, or t
tnacttgcttcctgtgcatctcncactatagtaaaatttgtttnaaaattacgcttcttagcccntcaaatccaaatggtctcttnt

SEQ ID NO: 859 - DNA, 87 bp, Artificial Sequence
  Synthetic Probe
  modified_base (2)..(2): DNP phosphoramidite base
  misc_feature (2)..(2): n is a, c, g, or t
  modified_base (23)..(23): DNP phosphoramidite base
  misc_feature (23)..(23): n is a, c, g, or t
  modified_base (44)..(44): DNP phosphoramidite base
  misc_feature (44)..(44): n is a, c, g, or t
  modified_base (65)..(65): DNP phosphoramidite base
  misc_feature (65)..(65): n is a, c, g, or t
  modified_base (86)..(86): DNP phosphoramidite base
  misc_feature (86)..(86): n is a, c, g, or t
tngctcttctatgctctaggatntatagtgcataaaaaaaagtngcactatatatatagtgcacncccccccaccacccccagcant

SEQ ID NO: 860 - DNA, 87 bp, Artificial Sequence
  Synthetic Probe
  modified_base (2)..(2): DNP phosphoramidite base
  misc_feature (2)..(2): n is a, c, g, or t
  modified_base (23)..(23): DNP phosphoramidite base
  misc_feature (23)..(23): n is a, c, g, or t
  modified_base (44)..(44): DNP phosphoramidite base
  misc_feature (44)..(44): n is a, c, g, or t
  modified_base (65)..(65): DNP phosphoramidite base
  misc_feature (65)..(65): n is a, c, g, or t
  modified_base (86)..(86): DNP phosphoramidite base
  misc_feature (86)..(86): n is a, c, g, or t
tnagttatagaaatacatataanaaggctgtggtaacatttaanaaagggagtaactgactctangaaatatttaaagtaactttnt

SEQ ID NO: 861 - DNA, 87 bp, Artificial Sequence
  Synthetic Probe
  modified_base (2)..(2): DNP phosphoramidite base
  misc_feature (2)..(2): n is a, c, g, or t
  modified_base (23)..(23): DNP phosphoramidite base
  misc_feature (23)..(23): n is a, c, g, or t
  modified_base (44)..(44): DNP phosphoramidite base
  misc_feature (44)..(44): n is a, c, g, or t
  modified_base (65)..(65): DNP phosphoramidite base
  misc_feature (65)..(65): n is a, c, g, or t
  modified_base (86)..(86): DNP phosphoramidite base
  misc_feature (86)..(86): n is a, c, g, or t
tnaataagaccattgaattattnaacccagatttgaatcatgtntgtttctgtagcaaatgtagnagggaagttttgttctcctgnt

SEQ ID NO: 862 - DNA, 87 bp, Artificial Sequence
  Synthetic Probe
  modified_base (2)..(2): DNP phosphoramidite base
  misc_feature (2)..(2): n is a, c, g, or t
  modified_base (23)..(23): DNP phosphoramidite base
  misc_feature (23)..(23): n is a, c, g, or t
  modified_base (44)..(44): DNP phosphoramidite base
  misc_feature (44)..(44): n is a, c, g, or t
  modified_base (65)..(65): DNP phosphoramidite base
  misc_feature (65)..(65): n is a, c, g, or t
  modified_base (86)..(86): DNP phosphoramidite base
  misc_feature (86)..(86): n is a, c, g, or t
tnagtacttccttcctaaatacnagtaacttttaacagtaattnttaacaccagaagcaagaagntaaacaaaaatctctgatgant

SEQ ID NO: 863 - DNA, 87 bp, Artificial Sequence
  Synthetic Probe
  modified_base (2)..(2): DNP phosphoramidite base
  misc_feature (2)..(2): n is a, c, g, or t
  modified_base (23)..(23): DNP phosphoramidite base
  misc_feature (23)..(23): n is a, c, g, or t
  modified_base (44)..(44): DNP phosphoramidite base
  misc_feature (44)..(44): n is a, c, g, or t
  modified_base (65)..(65): DNP phosphoramidite base
  misc_feature (65)..(65): n is a, c, g, or t
  modified_base (86)..(86): DNP phosphoramidite base
  misc_feature (86)..(86): n is a, c, g, or t
tngtctgttggcctttagtttantagtttgtaaaatggtggtcnacatgtcaatgctgactaganagaaggagatgctactgtaant

SEQ ID NO: 864 - DNA, 87 bp, Artificial Sequence
  Synthetic Probe
  modified_base (2)..(2): DNP phosphoramidite base
  misc_feature (2)..(2): n is a, c, g, or t
  modified_base (23)..(23): DNP phosphoramidite base
  misc_feature (23)..(23): n is a, c, g, or t
  modified_base (44)..(44): DNP phosphoramidite base
  misc_feature (44)..(44): n is a, c, g, or t
  modified_base (65)..(65): DNP phosphoramidite base
  misc_feature (65)..(65): n is a, c, g, or t
  modified_base (86)..(86): DNP phosphoramidite base
  misc_feature (86)..(86): n is a, c, g, or t
tntggtgcttgtaatgaggactnataattcatcaaaaaggtaanattgtgaattgtgcacacgcnacacacactcttctaagcaant

SEQ ID NO: 865 - DNA, 87 bp, Artificial Sequence
  Synthetic Probe
  modified_base (2)..(2): DNP phosphoramidite base
  misc_feature (2)..(2): n is a, c, g, or t
  modified_base (23)..(23): DNP phosphoramidite base
  misc_feature (23)..(23): n is a, c, g, or t
  modified_base (44)..(44): DNP phosphoramidite base
  misc_feature (44)..(44): n is a, c, g, or t
  modified_base (65)..(65): DNP phosphoramidite base
  misc_feature (65)..(65): n is a, c, g, or t
  modified_base (86)..(86): DNP phosphoramidite base
  misc_feature (86)..(86): n is a, c, g, or t
tnacagtcttcaaattgaaatanacttatttcgatatgtagaanaattaggataagcaaaaccanatttatttactcttaagagtnt

SEQ ID NO: 866 - DNA, 87 bp, Artificial Sequence
  Synthetic Probe
  modified_base (2)..(2): DNP phosphoramidite base
  misc_feature (2)..(2): n is a, c, g, or t
  modified_base (23)..(23): DNP phosphoramidite base
  misc_feature (23)..(23): n is a, c, g, or t
  modified_base (44)..(44): DNP phosphoramidite base
  misc_feature (44)..(44): n is a, c, g, or t
  modified_base (65)..(65): DNP phosphoramidite base
  misc_feature (65)..(65): n is a, c, g, or t
  modified_base (86)..(86): DNP phosphoramidite base
  misc_feature (86)..(86): n is a, c, g, or t
tnacccataaatatactacagtnagaataaggaataaaaccagntgatctgtctactatagtaanctaggtttctttcttggtaant

SEQ ID NO: 867 - DNA, 87 bp, Artificial Sequence
  Synthetic Probe
  modified_base (2)..(2): DNP phosphoramidite base
  misc_feature (2)..(2): n is a, c, g, or t
  modified_base (23)..(23): DNP phosphoramidite base
  misc_feature (23)..(23): n is a, c, g, or t
  modified_base (44)..(44): DNP phosphoramidite base
  misc_feature (44)..(44): n is a, c, g, or t
  modified_base (65)..(65): DNP phosphoramidite base
  misc_feature (65)..(65): n is a, c, g, or t
  modified_base (86)..(86): DNP phosphoramidite base
  misc_feature (86)..(86): n is a, c, g, or t
tntacttagggaacatatgaggngttccctgtgggttgttattntattatataaaatagttgctnctggtagttccataatagagnt

SEQ ID NO: 868 - DNA, 87 bp, Artificial Sequence
  Synthetic Probe
  modified_base (2)..(2): DNP phosphoramidite base
  misc_feature (2)..(2): n is a, c, g, or t
  modified_base (23)..(23): DNP phosphoramidite base
  misc_feature (23)..(23): n is a, c, g, or t
  modified_base (44)..(44): DNP phosphoramidite base
  misc_feature (44)..(44): n is a, c, g, or t
  modified_base (65)..(65): DNP phosphoramidite base
  misc_feature (65)..(65): n is a, c, g, or t
  modified_base (86)..(86): DNP phosphoramidite base
  misc_feature (86)..(86): n is a, c, g, or t
tntcagtgccattcagcagaganaaaatcataaacacagctgcntgtttttgtgtggcttgtggnttttggttttgttttcatttnt

SEQ ID NO: 869 - DNA, 87 bp, Artificial Sequence
  Synthetic Probe
  modified_base (2)..(2): DNP phosphoramidite base
  misc_feature (2)..(2): n is a, c, g, or t
  modified_base (23)..(23): DNP phosphoramidite base
  misc_feature (23)..(23): n is a, c, g, or t
  modified_base (44)..(44): DNP phosphoramidite base
  misc_feature (44)..(44): n is a, c, g, or t
  modified_base (65)..(65): DNP phosphoramidite base
  misc_feature (65)..(65): n is a, c, g, or t
  modified_base (86)..(86): DNP phosphoramidite base
  misc_feature (86)..(86): n is a, c, g, or t
tntttttgtaggcttaaaaaaantttaagtcacttctataattngttcatacagattgatccatnctggtctttttactagccaant

SEQ ID NO: 870 - DNA, 87 bp, Artificial Sequence
  Synthetic Probe
  modified_base (2)..(2): DNP phosphoramidite base
  misc_feature (2)..(2): n is a, c, g, or t
  modified_base (23)..(23): DNP phosphoramidite base
  misc_feature (23)..(23): n is a, c, g, or t
  modified_base (44)..(44): DNP phosphoramidite base
  misc_feature (44)..(44): n is a, c, g, or t
  modified_base (65)..(65): DNP phosphoramidite base
  misc_feature (65)..(65): n is a, c, g, or t
  modified_base (86)..(86): DNP phosphoramidite base
  misc_feature (86)..(86): n is a, c, g, or t
tnaaaatagtttcaactatcaanaaaatatttttcttatattcnttcattgtttcctgttaattntctgtattttcgtgggggctnt

SEQ ID NO: 871 - DNA, 87 bp, Artificial Sequence
  Synthetic Probe
  modified_base (2)..(2): DNP phosphoramidite base
  misc_feature (2)..(2): n is a, c, g, or t
  modified_base (23)..(23): DNP phosphoramidite base
  misc_feature (23)..(23): n is a, c, g, or t
  modified_base (44)..(44): DNP phosphoramidite base
  misc_feature (44)..(44): n is a, c, g, or t
  modified_base (65)..(65): DNP phosphoramidite base
  misc_feature (65)..(65): n is a, c, g, or t
  modified_base (86)..(86): DNP phosphoramidite base
  misc_feature (86)..(86): n is a, c, g, or t
tnctagattagaatacttaagantgaattattactacttagccntaatcaagtcaaactatgganaaatgagtttttacattttant

SEQ ID NO: 872 - DNA, 87 bp, Artificial Sequence
  Synthetic Probe
  modified_base (2)..(2): DNP phosphoramidite base
  misc_feature (2)..(2): n is a, c, g, or t
  modified_base (23)..(23): DNP phosphoramidite base
  misc_feature (23)..(23): n is a, c, g, or t
  modified_base (44)..(44): DNP phosphoramidite base
  misc_feature (44)..(44): n is a, c, g, or t
  modified_base (65)..(65): DNP phosphoramidite base
  misc_feature (65)..(65): n is a, c, g, or t
  modified_base (86)..(86): DNP phosphoramidite base
  misc_feature (86)..(86): n is a, c, g, or t
tnttctgctttgggacaaccatnacatctaattccttaaagtangttttatatgtaaaacttgcnaaagaatcagaacaatgcctnt

SEQ ID NO: 873 - DNA, 87 bp, Artificial Sequence
  Synthetic Probe
  modified_base (2)..(2): DNP phosphoramidite base
  misc_feature (2)..(2): n is a, c, g, or t
  modified_base (23)..(23): DNP phosphoramidite base
  misc_feature (23)..(23): n is a, c, g, or t
  modified_base (44)..(44): DNP phosphoramidite base
  misc_feature (44)..(44): n is a, c, g, or t
  modified_base (65)..(65): DNP phosphoramidite base
  misc_feature (65)..(65): n is a, c, g, or t
  modified_base (86)..(86): DNP phosphoramidite base
  misc_feature (86)..(86): n is a, c, g, or t
tnccacgaccatcatcaggtganactgtggggcatccacttgantgcccccaagaatcctagtangaatgtttactaccaaatggnt

SEQ ID NO: 874 - DNA, 87 bp, Artificial Sequence
  Synthetic Probe
  modified_base (2)..(2): DNP phosphoramidite base
  misc_feature (2)..(2): n is a, c, g, or t
  modified_base (23)..(23): DNP phosphoramidite base
  misc_feature (23)..(23): n is a, c, g, or t
  modified_base (44)..(44): DNP phosphoramidite base
  misc_feature (44)..(44): n is a, c, g, or t
  modified_base (65)..(65): DNP phosphoramidite base
  misc_feature (65)..(65): n is a, c, g, or t
  modified_base (86)..(86): DNP phosphoramidite base
  misc_feature (86)..(86): n is a, c, g, or t
tnaatgatagtgactttagaatngcctccgtgaggctacattanataaccataaagcatgaactnatttaaagaagcaagaaaatnt

SEQ ID NO: 875 - DNA, 87 bp, Artificial Sequence
  Synthetic Probe
  modified_base (2)..(2): DNP phosphoramidite base
  misc_feature (2)..(2): n is a, c, g, or t
  modified_base (23)..(23): DNP phosphoramidite base
  misc_feature (23)..(23): n is a, c, g, or t
  modified_base (44)..(44): DNP phosphoramidite base
  misc_feature (44)..(44): n is a, c, g, or t
  modified_base (65)..(65): DNP phosphoramidite base
  misc_feature (65)..(65): n is a, c, g, or t
  modified_base (86)..(86): DNP phosphoramidite base
  misc_feature (86)..(86): n is a, c, g, or t
tntggtatgatacaatatcctanttctaaaatgcaaataaccantaaagcttaactgttgtcccntttctaaaatatttctgtctnt

SEQ ID NO: 876 - DNA, 87 bp, Artificial Sequence
  Synthetic Probe
  modified_base (2)..(2): DNP phosphoramidite base
  misc_feature (2)..(2): n is a, c, g, or t
  modified_base (23)..(23): DNP phosphoramidite base
  misc_feature (23)..(23): n is a, c, g, or t
  modified_base (44)..(44): DNP phosphoramidite base
  misc_feature (44)..(44): n is a, c, g, or t
  modified_base (65)..(65): DNP phosphoramidite base
  misc_feature (65)..(65): n is a, c, g, or t
  modified_base (86)..(86): DNP phosphoramidite base
  misc_feature (86)..(86): n is a, c, g, or t
tnaaaccaataccttcgtaatcnttaaatagctttctaaataanaaatcataaatctaaagtatngttttactatcgaactatggnt

SEQ ID NO: 877 - DNA, 87 bp, Artificial Sequence
  Synthetic Probe
  modified_base (2)..(2): DNP phosphoramidite base
  misc_feature (2)..(2): n is a, c, g, or t
  modified_base (23)..(23): DNP phosphoramidite base
  misc_feature (23)..(23): n is a, c, g, or t
  modified_base (44)..(44): DNP phosphoramidite base
  misc_feature (44)..(44): n is a, c, g, or t
  modified_base (65)..(65): DNP phosphoramidite base
  misc_feature (65)..(65): n is a, c, g, or t
  modified_base (86)..(86): DNP phosphoramidite base
  misc_feature (86)..(86): n is a, c, g, or t
tnggatgacttagatttgttatnatctcagtgttgttattcttnttaaaaatgattgataggaantgtttgctgcctttgctctant

SEQ ID NO: 878 - DNA, 87 bp, Artificial Sequence
  Synthetic Probe
  modified_base (2)..(2): DNP phosphoramidite base
  misc_feature (2)..(2): n is a, c, g, or t
  modified_base (23)..(23): DNP phosphoramidite base
  misc_feature (23)..(23): n is a, c, g, or t
  modified_base (44)..(44): DNP phosphoramidite base
  misc_feature (44)..(44): n is a, c, g, or t
  modified_base (65)..(65): DNP phosphoramidite base
  misc_feature (65)..(65): n is a, c, g, or t
  modified_base (86)..(86): DNP phosphoramidite base
  misc_feature (86)..(86): n is a, c, g, or t
tntagacaatgcatttcctctcnccctcgtaattttcttacctnttcctccctcacattttctgntcattctaattgaacatcttnt

SEQ ID NO: 879 - DNA, 87 bp, Artificial Sequence
  Synthetic Probe
  modified_base (2)..(2): DNP phosphoramidite base
  misc_feature (2)..(2): n is a, c, g, or t
  modified_base (23)..(23): DNP phosphoramidite base
  misc_feature (23)..(23): n is a, c, g, or t
  modified_base (44)..(44): DNP phosphoramidite base
  misc_feature (44)..(44): n is a, c, g, or t
  modified_base (65)..(65): DNP phosphoramidite base
  misc_feature (65)..(65): n is a, c, g, or t
  modified_base (86)..(86): DNP phosphoramidite base
  misc_feature (86)..(86): n is a, c, g, or t
tngcaatttatattcagaagtgntttgattgatcttgtgcttcnaacgtaaatcctaaatgttangtattttaaatgttataggant

SEQ ID NO: 880 - DNA, 87 bp, Artificial Sequence
  Synthetic Probe
  modified_base (2)..(2): DNP phosphoramidite base
  misc_feature (2)..(2): n is a, c, g, or t
  modified_base (23)..(23): DNP phosphoramidite base
  misc_feature (23)..(23): n is a, c, g, or t
  modified_base (44)..(44): DNP phosphoramidite base
  misc_feature (44)..(44): n is a, c, g, or t
  modified_base (65)..(65): DNP phosphoramidite base
  misc_feature (65)..(65): n is a, c, g, or t
  modified_base (86)..(86): DNP phosphoramidite base
  misc_feature (86)..(86): n is a, c, g, or t
tnttacttttaaaatgaaaaacncttacaggaaatggctcgccncccttaatctcttacagtatnataagaagctgtataatgctnt

SEQ ID NO: 881 - DNA, 87 bp, Artificial Sequence
  Synthetic Probe
  modified_base (2)..(2): DNP phosphoramidite base
  misc_feature (2)..(2): n is a, c, g, or t
  modified_base (23)..(23): DNP phosphoramidite base
  misc_feature (23)..(23): n is a, c, g, or t
  modified_base (44)..(44): DNP phosphoramidite base
  misc_feature (44)..(44): n is a, c, g, or t
  modified_base (65)..(65): DNP phosphoramidite base
  misc_feature (65)..(65): n is a, c, g, or t
  modified_base (86)..(86): DNP phosphoramidite base
  misc_feature (86)..(86): n is a, c, g, or t
tntgggaggatgcccaatttgantgttgatggctaaagaaagcnctttattctcaactgccaatnggactgttttacaatgccatnt

SEQ ID NO: 882 - DNA, 87 bp, Artificial Sequence
  Synthetic Probe
  modified_base (2)..(2): DNP phosphoramidite base
  misc_feature (2)..(2): n is a, c, g, or t
  modified_base (23)..(23): DNP phosphoramidite base
  misc_feature (23)..(23): n is a, c, g, or t
  modified_base (44)..(44): DNP phosphoramidite base
  misc_feature (44)..(44): n is a, c, g, or t
  modified_base (65)..(65): DNP phosphoramidite base
  misc_feature (65)..(65): n is a, c, g, or t
  modified_base (86)..(86): DNP phosphoramidite base
  misc_feature (86)..(86): n is a, c, g, or t
tnatgaatggagaaacatctacnaaaatccctttgggttataanatagtgcactcagaataaaanattctttgtgcaacctacgtnt

SEQ ID NO: 883 - DNA, 87 bp, Artificial Sequence
  Synthetic Probe
  modified_base (2)..(2): DNP phosphoramidite base
  misc_feature (2)..(2): n is a, c, g, or t
  modified_base (23)..(23): DNP phosphoramidite base
  misc_feature (23)..(23): n is a, c, g, or t
  modified_base (44)..(44): DNP phosphoramidite base
  misc_feature (44)..(44): n is a, c, g, or t
  modified_base (65)..(65): DNP phosphoramidite base
  misc_feature (65)..(65): n is a, c, g, or t
  modified_base (86)..(86): DNP phosphoramidite base
  misc_feature (86)..(86): n is a, c, g, or t
tncaaattaatttgttagtgggnagagggagttatggggaacanttttaaattattactgcctgngatgtgatgaagaaataaaant

SEQ ID NO: 884 - DNA, 87 bp, Artificial Sequence
  Synthetic Probe
  modified_base (2)..(2): DNP phosphoramidite base
  misc_feature (2)..(2): n is a, c, g, or t
  modified_base (23)..(23): DNP phosphoramidite base
  misc_feature (23)..(23): n is a, c, g, or t
  modified_base (44)..(44): DNP phosphoramidite base
  misc_feature (44)..(44): n is a, c, g, or t
  modified_base (65)..(65): DNP phosphoramidite base
  misc_feature (65)..(65): n is a, c, g, or t
  modified_base (86)..(86): DNP phosphoramidite base
  misc_feature (86)..(86): n is a, c, g, or t
tntattggactttatgataaaantaacaatagagctaactagtngactcctccagaagtaaatcntcataatgaatttagactgant

SEQ ID NO: 885 - DNA, 87 bp, Artificial Sequence
  Synthetic Probe
  modified_base (2)..(2): DNP phosphoramidite base
  misc_feature (2)..(2): n is a, c, g, or t
  modified_base (23)..(23): DNP phosphoramidite base
  misc_feature (23)..(23): n is a, c, g, or t
  modified_base (44)..(44): DNP phosphoramidite base
  misc_feature (44)..(44): n is a, c, g, or t
  modified_base (65)..(65): DNP phosphoramidite base
  misc_feature (65)..(65): n is a, c, g, or t
  modified_base (86)..(86): DNP phosphoramidite base
  misc_feature (86)..(86): n is a, c, g, or t
tncagggattgcatgcaaatatnctcatgcttgctttggttcantattttctatttataattaanaatacatgtaatttcaaatgnt

SEQ ID NO: 886 - DNA, 87 bp, Artificial Sequence
  Synthetic Probe
  modified_base (2)..(2): DNP phosphoramidite base
  misc_feature (2)..(2): n is a, c, g, or t
  modified_base (23)..(23): DNP phosphoramidite base
  misc_feature (23)..(23): n is a, c, g, or t
  modified_base (44)..(44): DNP phosphoramidite base
  misc_feature (44)..(44): n is a, c, g, or t
  modified_base (65)..(65): DNP phosphoramidite base
  misc_feature (65)..(65): n is a, c, g, or t
  modified_base (86)..(86): DNP phosphoramidite base
  misc_feature (86)..(86): n is a, c, g, or t
tncttaaaccttgaaaaatcaanttttttttttttagatattcnccattattatagagatgattngttgaattttccttttggggnt

SEQ ID NO: 887 - DNA, 87 bp, Artificial Sequence
  Synthetic Probe
  modified_base (2)..(2): DNP phosphoramidite base
  misc_feature (2)..(2): n is a, c, g, or t
  modified_base (23)..(23): DNP phosphoramidite base
  misc_feature (23)..(23): n is a, c, g, or t
  modified_base (44)..(44): DNP phosphoramidite base
  misc_feature (44)..(44): n is a, c, g, or t
  modified_base (65)..(65): DNP phosphoramidite base
  misc_feature (65)..(65): n is a, c, g, or t
  modified_base (86)..(86): DNP phosphoramidite base
  misc_feature (86)..(86): n is a, c, g, or t
tncactctagtatctggaaaaantggctttgaatctttggccangtacctcatggattagaagantttgctgaaccctattggtgnt

SEQ ID NO: 888 - DNA, 87 bp, Artificial Sequence
  Synthetic Probe
  modified_base (2)..(2): DNP phosphoramidite base
  misc_feature (2)..(2): n is a, c, g, or t
  modified_base (23)..(23): DNP phosphoramidite base
  misc_feature (23)..(23): n is a, c, g, or t
  modified_base (44)..(44): DNP phosphoramidite base
  misc_feature (44)..(44): n is a, c, g, or t
  modified_base (65)..(65): DNP phosphoramidite base
  misc_feature (65)..(65): n is a, c, g, or t
  modified_base (86)..(86): DNP phosphoramidite base
  misc_feature (86)..(86): n is a, c, g, or t
tnagtggtataacatatattcantaatttttcttaactgttaanctaaatgtaagtacttataantccatttgcattttccttttnt

SEQ ID NO: 889 - DNA, 87 bp, Artificial Sequence
  Synthetic Probe
  modified_base (2)..(2): DNP phosphoramidite base
  misc_feature (2)..(2): n is a, c, g, or t
  modified_base (23)..(23): DNP phosphoramidite base
  misc_feature (23)..(23): n is a, c, g, or t
  modified_base (44)..(44): DNP phosphoramidite base
  misc_feature (44)..(44): n is a, c, g, or t
  modified_base (65)..(65): DNP phosphoramidite base
  misc_feature (65)..(65): n is a, c, g, or t
  modified_base (86)..(86): DNP phosphoramidite base
  misc_feature (86)..(86): n is a, c, g, or t
tntaaaaaagctagtaatgtaangaagtttgggacttcttaagnaagattcatatggagaagttnagacatgtcaaccttttgaant

SEQ ID NO: 890 - DNA, 87 bp, Artificial Sequence
  Synthetic Probe
  modified_base (2)..(2): DNP phosphoramidite base
  misc_feature (2)..(2): n is a, c, g, or t
  modified_base (23)..(23): DNP phosphoramidite base
  misc_feature (23)..(23): n is a, c, g, or t
  modified_base (44)..(44): DNP phosphoramidite base
  misc_feature (44)..(44): n is a, c, g, or t
  modified_base (65)..(65): DNP phosphoramidite base
  misc_feature (65)..(65): n is a, c, g, or t
  modified_base (86)..(86): DNP phosphoramidite base
  misc_feature (86)..(86): n is a, c, g, or t
tnttttgtttctcccacacagancactattgtgtaactatcccncgaaattctacccaaattgcnttctgtctgttaaatggaatnt

SEQ ID NO: 891 - DNA, 87 bp, Artificial Sequence
  Synthetic Probe
  modified_base (2)..(2): DNP phosphoramidite base
  misc_feature (2)..(2): n is a, c, g, or t
  modified_base (23)..(23): DNP phosphoramidite base
  misc_feature (23)..(23): n is a, c, g, or t
  modified_base (44)..(44): DNP phosphoramidite base
  misc_feature (44)..(44): n is a, c, g, or t
  modified_base (65)..(65): DNP phosphoramidite base
  misc_feature (65)..(65): n is a, c, g, or t
  modified_base (86)..(86): DNP phosphoramidite base
  misc_feature (86)..(86): n is a, c, g, or t
tnctcacctctagtaaaaggaanaaaaaaaagaaaaatcgtatnattagtgagtccccaaaggancagagaatgtaagttagcagnt

SEQ ID NO: 892 - DNA, 87 bp, Artificial Sequence
  Synthetic Probe
  modified_base (2)..(2): DNP phosphoramidite base
  misc_feature (2)..(2): n is a, c, g, or t
  modified_base (23)..(23): DNP phosphoramidite base
  misc_feature (23)..(23): n is a, c, g, or t
  modified_base (44)..(44): DNP phosphoramidite base
  misc_feature (44)..(44): n is a, c, g, or t
  modified_base (65)..(65): DNP phosphoramidite base
  misc_feature (65)..(65): n is a, c, g, or t
  modified_base (86)..(86): DNP phosphoramidite base
  misc_feature (86)..(86): n is a, c, g, or t
tntactgaatgaatttttccagncatcttcattactagtacttngaaggaaaaaaaaaaattaanaacaaagttattgtattaatnt

SEQ ID NO: 893 - DNA, 87 bp, Artificial Sequence
  Synthetic Probe
  modified_base (2)..(2): DNP phosphoramidite base
  misc_feature (2)..(2): n is a, c, g, or t
  modified_base (23)..(23): DNP phosphoramidite base
  misc_feature (23)..(23): n is a, c, g, or t
  modified_base (44)..(44): DNP phosphoramidite base
  misc_feature (44)..(44): n is a, c, g, or t
  modified_base (65)..(65): DNP phosphoramidite base
  misc_feature (65)..(65): n is a, c, g, or t
  modified_base (86)..(86): DNP phosphoramidite base
  misc_feature (86)..(86): n is a, c, g, or t
tntataggatggtagaaaataanttgtactctttctgatactgngaatttatgagcaagaagggntctagattgccctggaagaant

SEQ ID NO: 894 - DNA, 87 bp, Artificial Sequence
  Synthetic Probe
  modified_base (2)..(2): DNP phosphoramidite base
  misc_feature (2)..(2): n is a, c, g, or t
  modified_base (23)..(23): DNP phosphoramidite base
  misc_feature (23)..(23): n is a, c, g, or t
  modified_base (44)..(44): DNP phosphoramidite base
  misc_feature (44)..(44): n is a, c, g, or t
  modified_base (65)..(65): DNP phosphoramidite base
  misc_feature (65)..(65): n is a, c, g, or t
  modified_base (86)..(86): DNP phosphoramidite base
  misc_feature (86)..(86): n is a, c, g, or t
tnatatcacaaattggctatgantacagtggattaattaggaancatgaaattcattactcagantcattattggcttaaatgagnt

SEQ ID NO: 895 - DNA, 87 bp, Artificial Sequence
  Synthetic Probe
  modified_base (2)..(2): DNP phosphoramidite base
  misc_feature (2)..(2): n is a, c, g, or t
  modified_base (23)..(23): DNP phosphoramidite base
  misc_feature (23)..(23): n is a, c, g, or t
  modified_base (44)..(44): DNP phosphoramidite base
  misc_feature (44)..(44): n is a, c, g, or t
  modified_base (65)..(65): DNP phosphoramidite base
  misc_feature (65)..(65): n is a, c, g, or t
  modified_base (86)..(86): DNP phosphoramidite base
  misc_feature (86)..(86): n is a, c, g, or t
tnattttgatagggaactaaganttgcagtcatagaaacaagangcagttactttgagtggcttntgtgttttgttgtaacaatgnt

SEQ ID NO: 896 - DNA, 87 bp, Artificial Sequence
  Synthetic Probe
  modified_base (2)..(2): DNP phosphoramidite base
  misc_feature (2)..(2): n is a, c, g, or t
  modified_base (23)..(23): DNP phosphoramidite base
  misc_feature (23)..(23): n is a, c, g, or t
  modified_base (44)..(44): DNP phosphoramidite base
  misc_feature (44)..(44): n is a, c, g, or t
  modified_base (65)..(65): DNP phosphoramidite base
  misc_feature (65)..(65): n is a, c, g, or t
  modified_base (86)..(86): DNP phosphoramidite base
  misc_feature (86)..(86): n is a, c, g, or t
tnagtgataaaatataagaagcnattgtgctaacattagagttngtcagtgatagaaatgccttntacatgaacaagagctatctnt

SEQ ID NO: 897 - DNA, 87 bp, Artificial Sequence
  Synthetic Probe
  modified_base (2)..(2): DNP phosphoramidite base
  misc_feature (2)..(2): n is a, c, g, or t
  modified_base (23)..(23): DNP phosphoramidite base
  misc_feature (23)..(23): n is a, c, g, or t
  modified_base (44)..(44): DNP phosphoramidite base
  misc_feature (44)..(44): n is a, c, g, or t
  modified_base (65)..(65): DNP phosphoramidite base
  misc_feature (65)..(65): n is a, c, g, or t
  modified_base (86)..(86): DNP phosphoramidite base
  misc_feature (86)..(86): n is a, c, g, or t
tnaattccagcatgaaaattaantttattataattcctagctcnctaaccactttttcccccacntcacattttatattttcaatnt

SEQ ID NO: 898 - DNA, 87 bp, Artificial Sequence
  Synthetic Probe
  modified_base (2)..(2): DNP phosphoramidite base
  misc_feature (2)..(2): n is a, c, g, or t
  modified_base (23)..(23): DNP phosphoramidite base
  misc_feature (23)..(23): n is a, c, g, or t
  modified_base (44)..(44): DNP phosphoramidite base
  misc_feature (44)..(44): n is a, c, g, or t
  modified_base (65)..(65): DNP phosphoramidite base
  misc_feature (65)..(65): n is a, c, g, or t
  modified_base (86)..(86): DNP phosphoramidite base
  misc_feature (86)..(86): n is a, c, g, or t
tnttatcttttattaagtcagtnttcttactgtgactatccttntttttttaatcaggtacagantgaagtttttagttgagcaant

SEQ ID NO: 899 - DNA, 87 bp, Artificial Sequence
  Synthetic Probe
  modified_base (2)..(2): DNP phosphoramidite base
  misc_feature (2)..(2): n is a, c, g, or t
  modified_base (23)..(23): DNP phosphoramidite base
  misc_feature (23)..(23): n is a, c, g, or t
  modified_base (44)..(44): DNP phosphoramidite base
  misc_feature (44)..(44): n is a, c, g, or t
  modified_base (65)..(65): DNP phosphoramidite base
  misc_feature (65)..(65): n is a, c, g, or t
  modified_base (86)..(86): DNP phosphoramidite base
  misc_feature (86)..(86): n is a, c, g, or t
tnatgaggcgaccagatttcatnggatgctctacagggctttcntgtctcctctaaaccctgctncatcaactaggaaacctcagnt

SEQ ID NO: 900 - DNA, 87 bp, Artificial Sequence
  Synthetic Probe
  modified_base (2)..(2): DNP phosphoramidite base
  misc_feature (2)..(2): n is a, c, g, or t
  modified_base (23)..(23): DNP phosphoramidite base
  misc_feature (23)..(23): n is a, c, g, or t
  modified_base (44)..(44): DNP phosphoramidite base
  misc_feature (44)..(44): n is a, c, g, or t
  modified_base (65)..(65): DNP phosphoramidite base
  misc_feature (65)..(65): n is a, c, g, or t
  modified_base (86)..(86): DNP phosphoramidite base
  misc_feature (86)..(86): n is a, c, g, or t
tnttaaataaataccttttctgngataaaatcttgagaaaagtnaaaaatgtctgttataattangaatgttcaataatttatgcnt

SEQ ID NO: 901 - DNA, 87 bp, Artificial Sequence
  Synthetic Probe
  modified_base (2)..(2): DNP phosphoramidite base
  misc_feature (2)..(2): n is a, c, g, or t
  modified_base (23)..(23): DNP phosphoramidite base
  misc_feature (23)..(23): n is a, c, g, or t
  modified_base (44)..(44): DNP phosphoramidite base
  misc_feature (44)..(44): n is a, c, g, or t
  modified_base (65)..(65): DNP phosphoramidite base
  misc_feature (65)..(65): n is a, c, g, or t
  modified_base (86)..(86): DNP phosphoramidite base
  misc_feature (86)..(86): n is a, c, g, or t
tnttctctctctcattctcctanccctcaaaataagagtagtantatcttaagttcagtactgcnctttattcagaatgagttttnt

SEQ ID NO: 902 - DNA, 87 bp, Artificial Sequence
  Synthetic Probe
  modified_base (2)..(2): DNP phosphoramidite base
  misc_feature (2)..(2): n is a, c, g, or t
  modified_base (23)..(23): DNP phosphoramidite base
  misc_feature (23)..(23): n is a, c, g, or t
  modified_base (44)..(44): DNP phosphoramidite base
  misc_feature (44)..(44): n is a, c, g, or t
  modified_base (65)..(65): DNP phosphoramidite base
  misc_feature (65)..(65): n is a, c, g, or t
  modified_base (86)..(86): DNP phosphoramidite base
  misc_feature (86)..(86): n is a, c, g, or t
tntactacttaaataatacagtnttaaaaccttctatggccagnaatttctgttaccataggatnaagaaatggaaatgtaatatnt

SEQ ID NO: 903 - DNA, 87 bp, Artificial Sequence
  Synthetic Probe
  modified_base (2)..(2): DNP phosphoramidite base
  misc_feature (2)..(2): n is a, c, g, or t
  modified_base (23)..(23): DNP phosphoramidite base
  misc_feature (23)..(23): n is a, c, g, or t
  modified_base (44)..(44): DNP phosphoramidite base
  misc_feature (44)..(44): n is a, c, g, or t
  modified_base (65)..(65): DNP phosphoramidite base
  misc_feature (65)..(65): n is a, c, g, or t
  modified_base (86)..(86): DNP phosphoramidite base
  misc_feature (86)..(86): n is a, c, g, or t
tnattatataacttttaaaactntttagttttttttatactctnttaggaatggattcctaaatnaaaaattgaggtgaaagttgnt

SEQ ID NO: 904 - DNA, 87 bp, Artificial Sequence
  Synthetic Probe
  modified_base (2)..(2): DNP phosphoramidite base
  misc_feature (2)..(2): n is a, c, g, or t
  modified_base (23)..(23): DNP phosphoramidite base
  misc_feature (23)..(23): n is a, c, g, or t
  modified_base (44)..(44): DNP phosphoramidite base
  misc_feature (44)..(44): n is a, c, g, or t
  modified_base (65)..(65): DNP phosphoramidite base
  misc_feature (65)..(65): n is a, c, g, or t
  modified_base (86)..(86): DNP phosphoramidite base
  misc_feature (86)..(86): n is a, c, g, or t
tncttcaaaaagctatattgtantttatattttaaaataaattntcagggtaaaataataataanagcaaaggtacctagtaaagnt

SEQ ID NO: 905 - DNA, 87 bp, Artificial Sequence
  Synthetic Probe
  modified_base (2)..(2): DNP phosphoramidite base
  misc_feature (2)..(2): n is a, c, g, or t
  modified_base (23)..(23): DNP phosphoramidite base
  misc_feature (23)..(23): n is a, c, g, or t
  modified_base (44)..(44): DNP phosphoramidite base
  misc_feature (44)..(44): n is a, c, g, or t
  modified_base (65)..(65): DNP phosphoramidite base
  misc_feature (65)..(65): n is a, c, g, or t
  modified_base (86)..(86): DNP phosphoramidite base
  misc_feature (86)..(86): n is a, c, g, or t
tngaacccagacatcatgtcagnagttactgtttcagaacaatngagatcatctttaaaaatggnggatggtaaggaagagtattnt

SEQ ID NO: 906 - DNA, 87 bp, Artificial Sequence
  Synthetic Probe
  modified_base (2)..(2): DNP phosphoramidite base
  misc_feature (2)..(2): n is a, c, g, or t
  modified_base (23)..(23): DNP phosphoramidite base
  misc_feature (23)..(23): n is a, c, g, or t
  modified_base (44)..(44): DNP phosphoramidite base
  misc_feature (44)..(44): n is a, c, g, or t
  modified_base (65)..(65): DNP phosphoramidite base
  misc_feature (65)..(65): n is a, c, g, or t
  modified_base (86)..(86): DNP phosphoramidite base
  misc_feature (86)..(86): n is a, c, g, or t
tntgaaatatgcatgtataatcnaatgaaaagaaaagaagtacntaggtttagatcagaagtccntgaaatcagttttttgttttnt

SEQ ID NO: 907 - DNA, 87 bp, Artificial Sequence
  Synthetic Probe
  modified_base (2)..(2): DNP phosphoramidite base
  misc_feature (2)..(2): n is a, c, g, or t
  modified_base (23)..(23): DNP phosphoramidite base
  misc_feature (23)..(23): n is a, c, g, or t
  modified_base (44)..(44): DNP phosphoramidite base
  misc_feature (44)..(44): n is a, c, g, or t
  modified_base (65)..(65): DNP phosphoramidite base
  misc_feature (65)..(65): n is a, c, g, or t
  modified_base (86)..(86): DNP phosphoramidite base
  misc_feature (86)..(86): n is a, c, g, or t
tngagtgtcaccattaggaacanagacaaaggagacacaaaagnacccctgttttcattcagaanattaagagtttaaaagaaagnt

SEQ ID NO: 908 - DNA, 87 bp, Artificial Sequence
  Synthetic Probe
  modified_base (2)..(2): DNP phosphoramidite base
  misc_feature (2)..(2): n is a, c, g, or t
  modified_base (23)..(23): DNP phosphoramidite base
  misc_feature (23)..(23): n is a, c, g, or t
  modified_base (44)..(44): DNP phosphoramidite base
  misc_feature (44)..(44): n is a, c, g, or t
  modified_base (65)..(65): DNP phosphoramidite base
  misc_feature (65)..(65): n is a, c, g, or t
  modified_base (86)..(86): DNP phosphoramidite base
  misc_feature (86)..(86): n is a, c, g, or t
tntggaatcagttttgcagcaanaattatgcaaccagctatctntagagtttttaccagtctgtntggtttctacccaactttccnt

SEQ ID NO: 909 - DNA, 87 bp, Artificial Sequence
  Synthetic Probe
  modified_base (2)..(2): DNP phosphoramidite base
  misc_feature (2)..(2): n is a, c, g, or t
  modified_base (23)..(23): DNP phosphoramidite base
  misc_feature (23)..(23): n is a, c, g, or t
  modified_base (44)..(44): DNP phosphoramidite base
  misc_feature (44)..(44): n is a, c, g, or t
  modified_base (65)..(65): DNP phosphoramidite base
  misc_feature (65)..(65): n is a, c, g, or t
  modified_base (86)..(86): DNP phosphoramidite base
  misc_feature (86)..(86): n is a, c, g, or t
tntgacaaatttactaataaaantactcatgttttagcctgttnaaaacatttgctattttaaanattccatcatttaattgtaant

SEQ ID NO: 910 - DNA, 87 bp, Artificial Sequence
  Synthetic Probe
  modified_base (2)..(2): DNP phosphoramidite base
  misc_feature (2)..(2): n is a, c, g, or t
  modified_base (23)..(23): DNP phosphoramidite base
  misc_feature (23)..(23): n is a, c, g, or t
  modified_base (44)..(44): DNP phosphoramidite base
  misc_feature (44)..(44): n is a, c, g, or t
  modified_base (65)..(65): DNP phosphoramidite base
  misc_feature (65)..(65): n is a, c, g, or t
  modified_base (86)..(86): DNP phosphoramidite base
  misc_feature (86)..(86): n is a, c, g, or t
tnacgtgttactcctctttcagnaatgttaccttatggttgtcntgtcaatcggtgactgtgtgnggacttattgaggtggtgcgnt

SEQ ID NO: 911 - DNA, 87 bp, Artificial Sequence
  Synthetic Probe
  modified_base (2)..(2): DNP phosphoramidite base
  misc_feature (2)..(2): n is a, c, g, or t
  modified_base (23)..(23): DNP phosphoramidite base
  misc_feature (23)..(23): n is a, c, g, or t
  modified_base (44)..(44): DNP phosphoramidite base
  misc_feature (44)..(44): n is a, c, g, or t
  modified_base (65)..(65): DNP phosphoramidite base
  misc_feature (65)..(65): n is a, c, g, or t
  modified_base (86)..(86): DNP phosphoramidite base
  misc_feature (86)..(86): n is a, c, g, or t
tnaggtgcactgcagttcaacangccacacactacatcagtggnctcaaagacaagaacaaaggnagaaatgtgagttgtattatnt

SEQ ID NO: 912 - DNA, 87 bp, Artificial Sequence
  Synthetic Probe
  modified_base (2)..(2): DNP phosphoramidite base
  misc_feature (2)..(2): n is a, c, g, or t
  modified_base (23)..(23): DNP phosphoramidite base
  misc_feature (23)..(23): n is a, c, g, or t
  modified_base (44)..(44): DNP phosphoramidite base
  misc_feature (44)..(44): n is a, c, g, or t
  modified_base (65)..(65): DNP phosphoramidite base
  misc_feature (65)..(65): n is a, c, g, or t
  modified_base (86)..(86): DNP phosphoramidite base
  misc_feature (86)..(86): n is a, c, g, or t
tngaaaacaattgtactttctantggaaaaaaatatgctcaacnctttgaaatatttgatgttanatggatttaaatgattataant

SEQ ID NO: 913 - DNA, 87 bp, Artificial Sequence
  Synthetic Probe
  modified_base (2)..(2): DNP phosphoramidite base
  misc_feature (2)..(2): n is a, c, g, or t
  modified_base (23)..(23): DNP phosphoramidite base
  misc_feature (23)..(23): n is a, c, g, or t
  modified_base (44)..(44): DNP phosphoramidite base
  misc_feature (44)..(44): n is a, c, g, or t
  modified_base (65)..(65): DNP phosphoramidite base
  misc_feature (65)..(65): n is a, c, g, or t
  modified_base (86)..(86): DNP phosphoramidite base
  misc_feature (86)..(86): n is a, c, g, or t
tntgattagaaaaaaataatttntaatgacatgctaagtatttntttcacatgaagaattatgcntttggtcagggaacatctggnt

SEQ ID NO: 914 - DNA, 87 bp, Artificial Sequence
  Synthetic Probe
  modified_base (2)..(2): DNP phosphoramidite base
  misc_feature (2)..(2): n is a, c, g, or t
  modified_base (23)..(23): DNP phosphoramidite base
  misc_feature (23)..(23): n is a, c, g, or t
  modified_base (44)..(44): DNP phosphoramidite base
  misc_feature (44)..(44): n is a, c, g, or t
  modified_base (65)..(65): DNP phosphoramidite base
  misc_feature (65)..(65): n is a, c, g, or t
  modified_base (86)..(86): DNP phosphoramidite base
  misc_feature (86)..(86): n is a, c, g, or t
tncatactactcatgaggtgttntattctttgtagatatgatgncagccattgacctgtttacancgttcatgtgctggatactgnt

SEQ ID NO: 915 - DNA, 87 bp, Artificial Sequence
  Synthetic Probe
  modified_base (2)..(2): DNP phosphoramidite base
  misc_feature (2)..(2): n is a, c, g, or t
  modified_base (23)..(23): DNP phosphoramidite base
  misc_feature (23)..(23): n is a, c, g, or t
  modified_base (44)..(44): DNP phosphoramidite base
  misc_feature (44)..(44): n is a, c, g, or t
  modified_base (65)..(65): DNP phosphoramidite base
  misc_feature (65)..(65): n is a, c, g, or t
  modified_base (86)..(86): DNP phosphoramidite base
  misc_feature (86)..(86): n is a, c, g, or t
tntgtagctaccttcattttggngaattggagatcgtcacaatnagtaacatcatggtgaaagancgatggacaagtaatggtttnt

SEQ ID NO: 916 - DNA, 87 bp, Artificial Sequence
  Synthetic Probe
  modified_base (2)..(2): DNP phosphoramidite base
  misc_feature (2)..(2): n is a, c, g, or t
  modified_base (23)..(23): DNP phosphoramidite base
  misc_feature (23)..(23): n is a, c, g, or t
  modified_base (44)..(44): DNP phosphoramidite base
  misc_feature (44)..(44): n is a, c, g, or t
  modified_base (65)..(65): DNP phosphoramidite base
  misc_feature (65)..(65): n is a, c, g, or t
  modified_base (86)..(86): DNP phosphoramidite base
  misc_feature (86)..(86): n is a, c, g, or t
tntctctgtttaaaatgttttgngtgttcttaatttattcaagnacattttgtatctgcatatantcaaactataacataatttcnt

SEQ ID NO: 917 - DNA, 87 bp, Artificial Sequence
  Synthetic Probe
  modified_base (2)..(2): DNP phosphoramidite base
  misc_feature (2)..(2): n is a, c, g, or t
  modified_base (23)..(23): DNP phosphoramidite base
  misc_feature (23)..(23): n is a, c, g, or t
  modified_base (44)..(44): DNP phosphoramidite base
  misc_feature (44)..(44): n is a, c, g, or t
  modified_base (65)..(65): DNP phosphoramidite base
  misc_feature (65)..(65): n is a, c, g, or t
  modified_base (86)..(86): DNP phosphoramidite base
  misc_feature (86)..(86): n is a, c, g, or t
tnatttggttataaacgagaacngtgtgccatttgttttgacancaggatttcttaatagtgatntagtaaaggagcccaagaatnt

SEQ ID NO: 918 - DNA, 87 bp, Artificial Sequence
  Synthetic Probe
  modified_base (2)..(2): DNP phosphoramidite base
  misc_feature (2)..(2): n is a, c, g, or t
  modified_base (23)..(23): DNP phosphoramidite base
  misc_feature (23)..(23): n is a, c, g, or t
  modified_base (44)..(44): DNP phosphoramidite base
  misc_feature (44)..(44): n is a, c, g, or t
  modified_base (65)..(65): DNP phosphoramidite base
  misc_feature (65)..(65): n is a, c, g, or t
  modified_base (86)..(86): DNP phosphoramidite base
  misc_feature (86)..(86): n is a, c, g, or t
tntttttttgtcttgcaaatgtntctatgttttgaaatgtggancacaacaaaggctgttattgncattaggtgtaagtaaactgnt

SEQ ID NO: 919 - DNA, 87 bp, Artificial Sequence
  Synthetic Probe
  modified_base (2)..(2): DNP phosphoramidite base
  misc_feature (2)..(2): n is a, c, g, or t
  modified_base (23)..(23): DNP phosphoramidite base
  misc_feature (23)..(23): n is a, c, g, or t
  modified_base (44)..(44): DNP phosphoramidite base
  misc_feature (44)..(44): n is a, c, g, or t
  modified_base (65)..(65): DNP phosphoramidite base
  misc_feature (65)..(65): n is a, c, g, or t
  modified_base (86)..(86): DNP phosphoramidite base
  misc_feature (86)..(86): n is a, c, g, or t
tngttcaatttatagtttgaagntgggtttttgactgcttgttntaatgaagaaaaatgcttggnggtggaagggactcttgagant

SEQ ID NO: 920 - DNA, 87 bp, Artificial Sequence
  Synthetic Probe
  modified_base (2)..(2): DNP phosphoramidite base
  misc_feature (2)..(2): n is a, c, g, or t
  modified_base (23)..(23): DNP phosphoramidite base
  misc_feature (23)..(23): n is a, c, g, or t
  modified_base (44)..(44): DNP phosphoramidite base
  misc_feature (44)..(44): n is a, c, g, or t
  modified_base (65)..(65): DNP phosphoramidite base
  misc_feature (65)..(65): n is a, c, g, or t
  modified_base (86)..(86): DNP phosphoramidite base
  misc_feature (86)..(86): n is a, c, g, or t
tntttcaccagagactttttctnttttaataaatcaaacctttntgatgatttgaggttttatcntgcagttttggaagcagtcant

SEQ ID NO: 921 - DNA, 87 bp, Artificial Sequence
  Synthetic Probe
  modified_base (2)..(2): DNP phosphoramidite base
  misc_feature (2)..(2): n is a, c, g, or t
  modified_base (23)..(23): DNP phosphoramidite base
  misc_feature (23)..(23): n is a, c, g, or t
  modified_base (44)..(44): DNP phosphoramidite base
  misc_feature (44)..(44): n is a, c, g, or t
  modified_base (65)..(65): DNP phosphoramidite base
  misc_feature (65)..(65): n is a, c, g, or t
  modified_base (86)..(86): DNP phosphoramidite base
  misc_feature (86)..(86): n is a, c, g, or t
tncaaatgagacctgttataagngtggtatttttttttttcttnctggacagtatttaaaggatncttattcttatttcccagggnt

SEQ ID NO: 922 - DNA, 87 bp, Artificial Sequence
  Synthetic Probe
  modified_base (2)..(2): DNP phosphoramidite base
  misc_feature (2)..(2): n is a, c, g, or t
  modified_base (23)..(23): DNP phosphoramidite base
  misc_feature (23)..(23): n is a, c, g, or t
  modified_base (44)..(44): DNP phosphoramidite base
  misc_feature (44)..(44): n is a, c, g, or t
  modified_base (65)..(65): DNP phosphoramidite base
  misc_feature (65)..(65): n is a, c, g, or t
  modified_base (86)..(86): DNP phosphoramidite base
  misc_feature (86)..(86): n is a, c, g, or t
tntaagttgattttttttctccnttctgcaattgaactgaatancatttttcatgcatgttttcncagaaaatagaagtattaatnt

SEQ ID NO: 923 - DNA, 87 bp, Artificial Sequence
  Synthetic Probe
  modified_base (2)..(2): DNP phosphoramidite base
  misc_feature (2)..(2): n is a, c, g, or t
  modified_base (23)..(23): DNP phosphoramidite base
  misc_feature (23)..(23): n is a, c, g, or t
  modified_base (44)..(44): DNP phosphoramidite base
  misc_feature (44)..(44): n is a, c, g, or t
  modified_base (65)..(65): DNP phosphoramidite base
  misc_feature (65)..(65): n is a, c, g, or t
  modified_base (86)..(86): DNP phosphoramidite base
  misc_feature (86)..(86): n is a, c, g, or t
tnattatagaaactatcattaantatatattctttatttacatngatctgtcccatagtcatgcnattgttttgcaccccaaattnt

SEQ ID NO: 924 - DNA, 87 bp, Artificial Sequence
  Synthetic Probe
  modified_base (2)..(2): DNP phosphoramidite base
  misc_feature (2)..(2): n is a, c, g, or t
  modified_base (23)..(23): DNP phosphoramidite base
  misc_feature (23)..(23): n is a, c, g, or t
  modified_base (44)..(44): DNP phosphoramidite base
  misc_feature (44)..(44): n is a, c, g, or t
  modified_base (65)..(65): DNP phosphoramidite base
  misc_feature (65)..(65): n is a, c, g, or t
  modified_base (86)..(86): DNP phosphoramidite base
  misc_feature (86)..(86): n is a, c, g, or t
tnaaagtagaacattaaaccatntttaagatatgtctcattccncaagtagtcagagctcactcntccaactttattaaatactant

SEQ ID NO: 925 - DNA, 87 bp, Artificial Sequence
  Synthetic Probe
  modified_base (2)..(2): DNP phosphoramidite base
  misc_feature (2)..(2): n is a, c, g, or t
  modified_base (23)..(23): DNP phosphoramidite base
  misc_feature (23)..(23): n is a, c, g, or t
  modified_base (44)..(44): DNP phosphoramidite base
  misc_feature (44)..(44): n is a, c, g, or t
  modified_base (65)..(65): DNP phosphoramidite base
  misc_feature (65)..(65): n is a, c, g, or t
  modified_base (86)..(86): DNP phosphoramidite base
  misc_feature (86)..(86): n is a, c, g, or t
tntttgagcacaggacacattcnttaaacattttgaaaaacatntaacccaagatgtagaggctnactgctagtcgtcattctagnt

SEQ ID NO: 926 - DNA, 87 bp, Artificial Sequence
  Synthetic Probe
  modified_base (2)..(2): DNP phosphoramidite base
  misc_feature (2)..(2): n is a, c, g, or t
  modified_base (23)..(23): DNP phosphoramidite base
  misc_feature (23)..(23): n is a, c, g, or t
  modified_base (44)..(44): DNP phosphoramidite base
  misc_feature (44)..(44): n is a, c, g, or t
  modified_base (65)..(65): DNP phosphoramidite base
  misc_feature (65)..(65): n is a, c, g, or t
  modified_base (86)..(86): DNP phosphoramidite base
  misc_feature (86)..(86): n is a, c, g, or t
tnaatctgatattttactctgtnatttgaaatgaatgattaatngtcctaggaaattagctttangcagatgtccaggtgccacant

SEQ ID NO: 927 - DNA, 87 bp, Artificial Sequence
  Synthetic Probe
  modified_base (2)..(2): DNP phosphoramidite base
  misc_feature (2)..(2): n is a, c, g, or t
  modified_base (23)..(23): DNP phosphoramidite base
  misc_feature (23)..(23): n is a, c, g, or t
  modified_base (44)..(44): DNP phosphoramidite base
  misc_feature (44)..(44): n is a, c, g, or t
  modified_base (65)..(65): DNP phosphoramidite base
  misc_feature (65)..(65): n is a, c, g, or t
  modified_base (86)..(86): DNP phosphoramidite base
  misc_feature (86)..(86): n is a, c, g, or t
tnagttttttagattaggcatanttattggaaaacaactttatnaaagagtgaacattgtatacntctagtaaaacagcatcactnt

SEQ ID NO: 928 - DNA, 87 bp, Artificial Sequence
  Synthetic Probe
  modified_base (2)..(2): DNP phosphoramidite base
  misc_feature (2)..(2): n is a, c, g, or t
  modified_base (23)..(23): DNP phosphoramidite base
  misc_feature (23)..(23): n is a, c, g, or t
  modified_base (44)..(44): DNP phosphoramidite base
  misc_feature (44)..(44): n is a, c, g, or t
  modified_base (65)..(65): DNP phosphoramidite base
  misc_feature (65)..(65): n is a, c, g, or t
  modified_base (86)..(86): DNP phosphoramidite base
  misc_feature (86)..(86): n is a, c, g, or t
tntcatttatgaaatctgttacnctatagttgaagtcttgagtnagtgaacaagggactctaatnaccaatactcttaatatctgnt

SEQ ID NO: 929 - DNA, 87 bp, Artificial Sequence
  Synthetic Probe
  modified_base (2)..(2): DNP phosphoramidite base
  misc_feature (2)..(2): n is a, c, g, or t
  modified_base (23)..(23): DNP phosphoramidite base
  misc_feature (23)..(23): n is a, c, g, or t
  modified_base (44)..(44): DNP phosphoramidite base
  misc_feature (44)..(44): n is a, c, g, or t
  modified_base (65)..(65): DNP phosphoramidite base
  misc_feature (65)..(65): n is a, c, g, or t
  modified_base (86)..(86): DNP phosphoramidite base
  misc_feature (86)..(86): n is a, c, g, or t
tngctattttagatcccttaaangggcataattattggaaattntaggtatttcactaaagcatngtatataatattgccaacaant

SEQ ID NO: 930 - DNA, 87 bp, Artificial Sequence
  Synthetic Probe
  modified_base (2)..(2): DNP phosphoramidite base
  misc_feature (2)..(2): n is a, c, g, or t
  modified_base (23)..(23): DNP phosphoramidite base
  misc_feature (23)..(23): n is a, c, g, or t
  modified_base (44)..(44): DNP phosphoramidite base
  misc_feature (44)..(44): n is a, c, g, or t
  modified_base (65)..(65): DNP phosphoramidite base
  misc_feature (65)..(65): n is a, c, g, or t
  modified_base (86)..(86): DNP phosphoramidite base
  misc_feature (86)..(86): n is a, c, g, or t
tngaaaagtaaatttgaagattnaagggaacttacttctgcaanactgtcttgcgatagttaagncagaatttaaactctgttttnt

SEQ ID NO: 931 - DNA, 87 bp, Artificial Sequence
  Synthetic Probe
  modified_base (2)..(2): DNP phosphoramidite base
  misc_feature (2)..(2): n is a, c, g, or t
  modified_base (23)..(23): DNP phosphoramidite base
  misc_feature (23)..(23): n is a, c, g, or t
  modified_base (44)..(44): DNP phosphoramidite base
  misc_feature (44)..(44): n is a, c, g, or t
  modified_base (65)..(65): DNP phosphoramidite base
  misc_feature (65)..(65): n is a, c, g, or t
  modified_base (86)..(86): DNP phosphoramidite base
  misc_feature (86)..(86): n is a, c, g, or t
tnaagcaggaaaccagaaagatntattttgcagttgtagaagantttcataacttattaaaactntattaacattttgtgttgttnt

SEQ ID NO: 932 - DNA, 87 bp, Artificial Sequence
  Synthetic Probe
  modified_base (2)..(2): DNP phosphoramidite base
  misc_feature (2)..(2): n is a, c, g, or t
  modified_base (23)..(23): DNP phosphoramidite base
  misc_feature (23)..(23): n is a, c, g, or t
  modified_base (44)..(44): DNP phosphoramidite base
  misc_feature (44)..(44): n is a, c, g, or t
  modified_base (65)..(65): DNP phosphoramidite base
  misc_feature (65)..(65): n is a, c, g, or t
  modified_base (86)..(86): DNP phosphoramidite base
  misc_feature (86)..(86): n is a, c, g, or t
tncagttgatacatactaacatncccagccttttcaatatcagnggttaaattataggaaaactncagtaaaatggtacaaatctnt

SEQ ID NO: 933 - DNA, 87 bp, Artificial Sequence
  Synthetic Probe
  modified_base (2)..(2): DNP phosphoramidite base
  misc_feature (2)..(2): n is a, c, g, or t
  modified_base (23)..(23): DNP phosphoramidite base
  misc_feature (23)..(23): n is a, c, g, or t
  modified_base (44)..(44): DNP phosphoramidite base
  misc_feature (44)..(44): n is a, c, g, or t
  modified_base (65)..(65): DNP phosphoramidite base
  misc_feature (65)..(65): n is a, c, g, or t
  modified_base (86)..(86): DNP phosphoramidite base
  misc_feature (86)..(86): n is a, c, g, or t
tnatttagagttacttttttatnctgttagaacttaagctctcntaaatcttgaccgagtactgnaactgagtatgatttgaattnt

SEQ ID NO: 934 - DNA, 87 bp, Artificial Sequence
  Synthetic Probe
  modified_base (2)..(2): DNP phosphoramidite base
  misc_feature (2)..(2): n is a, c, g, or t
  modified_base (23)..(23): DNP phosphoramidite base
  misc_feature (23)..(23): n is a, c, g, or t
  modified_base (44)..(44): DNP phosphoramidite base
  misc_feature (44)..(44): n is a, c, g, or t
  modified_base (65)..(65): DNP phosphoramidite base
  misc_feature (65)..(65): n is a, c, g, or t
  modified_base (86)..(86): DNP phosphoramidite base
  misc_feature (86)..(86): n is a, c, g, or t
tngcaagagagagatgagaactncaccactcttaggcattcacnttaattaatttaaccaaatanatttccaggaatgcttagaant

SEQ ID NO: 935 - DNA, 87 bp, Artificial Sequence
  Synthetic Probe
  modified_base (2)..(2): DNP phosphoramidite base
  misc_feature (2)..(2): n is a, c, g, or t
  modified_base (23)..(23): DNP phosphoramidite base
  misc_feature (23)..(23): n is a, c, g, or t
  modified_base (44)..(44): DNP phosphoramidite base
  misc_feature (44)..(44): n is a, c, g, or t
  modified_base (65)..(65): DNP phosphoramidite base
  misc_feature (65)..(65): n is a, c, g, or t
  modified_base (86)..(86): DNP phosphoramidite base
  misc_feature (86)..(86): n is a, c, g, or t
tnaaggggaggatttatgacctnaaatgaagaaactataatttngtggattacgtgtttggaggntatatatagattatgagatgnt

SEQ ID NO: 936 - DNA, 87 bp, Artificial Sequence
  Synthetic Probe
  modified_base (2)..(2): DNP phosphoramidite base
  misc_feature (2)..(2): n is a, c, g, or t
  modified_base (23)..(23): DNP phosphoramidite base
  misc_feature (23)..(23): n is a, c, g, or t
  modified_base (44)..(44): DNP phosphoramidite base
  misc_feature (44)..(44): n is a, c, g, or t
  modified_base (65)..(65): DNP phosphoramidite base
  misc_feature (65)..(65): n is a, c, g, or t
  modified_base (86)..(86): DNP phosphoramidite base
  misc_feature (86)..(86): n is a, c, g, or t
tnatatctttgaccttctcgccnacctcttcctccacacccagnctgcccccagcactgacagcnggaagaggaattgtatttttnt

SEQ ID NO: 937 - DNA, 87 bp, Artificial Sequence
  Synthetic Probe
  modified_base (2)..(2): DNP phosphoramidite base
  misc_feature (2)..(2): n is a, c, g, or t
  modified_base (23)..(23): DNP phosphoramidite base
  misc_feature (23)..(23): n is a, c, g, or t
  modified_base (44)..(44): DNP phosphoramidite base
  misc_feature (44)..(44): n is a, c, g, or t
  modified_base (65)..(65): DNP phosphoramidite base
  misc_feature (65)..(65): n is a, c, g, or t
  modified_base (86)..(86): DNP phosphoramidite base
  misc_feature (86)..(86): n is a, c, g, or t
tnagatttccttcctctgtttcnttacctgagcataaaaggctnttagaatggttgttccgagcnaagaagaacattaggactgant

SEQ ID NO: 938 - DNA, 87 bp, Artificial Sequence
  Synthetic Probe
  modified_base (2)..(2): DNP phosphoramidite base
  misc_feature (2)..(2): n is a, c, g, or t
  modified_base (23)..(23): DNP phosphoramidite base
  misc_feature (23)..(23): n is a, c, g, or t
  modified_base (44)..(44): DNP phosphoramidite base
  misc_feature (44)..(44): n is a, c, g, or t
  modified_base (65)..(65): DNP phosphoramidite base
  misc_feature (65)..(65): n is a, c, g, or t
  modified_base (86)..(86): DNP phosphoramidite base
  misc_feature (86)..(86): n is a, c, g, or t
tnttggtgaaaagtccatctaanataagctaaagtgatgtgtanatcaagtatttttaaagatanttgtagcaaacaagcctaagnt

SEQ ID NO: 939 - DNA, 87 bp, Artificial Sequence
  Synthetic Probe
  modified_base (2)..(2): DNP phosphoramidite base
  misc_feature (2)..(2): n is a, c, g, or t
  modified_base (23)..(23): DNP phosphoramidite base
  misc_feature (23)..(23): n is a, c, g, or t
  modified_base (44)..(44): DNP phosphoramidite base
  misc_feature (44)..(44): n is a, c, g, or t
  modified_base (65)..(65): DNP phosphoramidite base
  misc_feature (65)..(65): n is a, c, g, or t
  modified_base (86)..(86): DNP phosphoramidite base
  misc_feature (86)..(86): n is a, c, g, or t
tnctgtttaatcaataactagangaatgttgtatgtaaataagntgttacgaactttgttatctnttcagggatattgcacgtccnt

SEQ ID NO: 940 - DNA, 87 bp, Artificial Sequence
  Synthetic Probe
  modified_base (2)..(2): DNP phosphoramidite base
  misc_feature (2)..(2): n is a, c, g, or t
  modified_base (23)..(23): DNP phosphoramidite base
  misc_feature (23)..(23): n is a, c, g, or t
  modified_base (44)..(44): DNP phosphoramidite base
  misc_feature (44)..(44): n is a, c, g, or t
  modified_base (65)..(65): DNP phosphoramidite base
  misc_feature (65)..(65): n is a, c, g, or t
  modified_base (86)..(86): DNP phosphoramidite base
  misc_feature (86)..(86): n is a, c, g, or t
tngtggctcatcaaaacttcatnaattcatctgacattcatttncacgggtgtatgtgaaatganatgtctaaacatgaagtacant

SEQ ID NO: 941 - DNA, 87 bp, Artificial Sequence
  Synthetic Probe
  modified_base (2)..(2): DNP phosphoramidite base
  misc_feature (2)..(2): n is a, c, g, or t
  modified_base (23)..(23): DNP phosphoramidite base
  misc_feature (23)..(23): n is a, c, g, or t
  modified_base (44)..(44): DNP phosphoramidite base
  misc_feature (44)..(44): n is a, c, g, or t
  modified_base (65)..(65): DNP phosphoramidite base
  misc_feature (65)..(65): n is a, c, g, or t
  modified_base (86)..(86): DNP phosphoramidite base
  misc_feature (86)..(86): n is a, c, g, or t
tnctatattaatatttccctgtnaattcgttttggttacagagngagacccttggtaattatttnttactcttctattttttaatnt

SEQ ID NO: 942 - DNA, 87 bp, Artificial Sequence
  Synthetic Probe
  modified_base (2)..(2): DNP phosphoramidite base
  misc_feature (2)..(2): n is a, c, g, or t
  modified_base (23)..(23): DNP phosphoramidite base
  misc_feature (23)..(23): n is a, c, g, or t
  modified_base (44)..(44): DNP phosphoramidite base
  misc_feature (44)..(44): n is a, c, g, or t
  modified_base (65)..(65): DNP phosphoramidite base
  misc_feature (65)..(65): n is a, c, g, or t
  modified_base (86)..(86): DNP phosphoramidite base
  misc_feature (86)..(86): n is a, c, g, or t
tnagtcaacatagttcatcaagnttcagcaagaggaaatagcanataattcagttgtgcatttcnagaaatgaaaatgggatacant

SEQ ID NO: 943 - DNA, 87 bp, Artificial Sequence
  Synthetic Probe
  modified_base (2)..(2): DNP phosphoramidite base
  misc_feature (2)..(2): n is a, c, g, or t
  modified_base (23)..(23): DNP phosphoramidite base
  misc_feature (23)..(23): n is a, c, g, or t
  modified_base (44)..(44): DNP phosphoramidite base
  misc_feature (44)..(44): n is a, c, g, or t
  modified_base (65)..(65): DNP phosphoramidite base
  misc_feature (65)..(65): n is a, c, g, or t
  modified_base (86)..(86): DNP phosphoramidite base
  misc_feature (86)..(86): n is a, c, g, or t
tnttgctttgatgacaacacaanctgcctttatatctagttaanttgtgtgacgtatgggacacntaaaacttgtttgcttgcatnt

SEQ ID NO: 944 - DNA, 87 bp, Artificial Sequence
  Synthetic Probe
  modified_base (2)..(2): DNP phosphoramidite base
  misc_feature (2)..(2): n is a, c, g, or t
  modified_base (23)..(23): DNP phosphoramidite base
  misc_feature (23)..(23): n is a, c, g, or t
  modified_base (44)..(44): DNP phosphoramidite base
  misc_feature (44)..(44): n is a, c, g, or t
  modified_base (65)..(65): DNP phosphoramidite base
  misc_feature (65)..(65): n is a, c, g, or t
  modified_base (86)..(86): DNP phosphoramidite base
  misc_feature (86)..(86): n is a, c, g, or t
tnaaaattggttcatgtctagcngagaagaacacctttctttcnctctgtagtctgtctggtccnttcttccctgaacccccatcnt

SEQ ID NO: 945 - DNA, 87 bp, Artificial Sequence
  Synthetic Probe
  modified_base (2)..(2): DNP phosphoramidite base
  misc_feature (2)..(2): n is a, c, g, or t
  modified_base (23)..(23): DNP phosphoramidite base
  misc_feature (23)..(23): n is a, c, g, or t
  modified_base (44)..(44): DNP phosphoramidite base
  misc_feature (44)..(44): n is a, c, g, or t
  modified_base (65)..(65): DNP phosphoramidite base
  misc_feature (65)..(65): n is a, c, g, or t
  modified_base (86)..(86): DNP phosphoramidite base
  misc_feature (86)..(86): n is a, c, g, or t
tncccagcgcagctgcagccatntagaagccccccgccttcctnggagaggtgagaacttcaggncaggctagccacgtggttctnt

SEQ ID NO: 946 - DNA, 87 bp, Artificial Sequence
  Synthetic Probe
  modified_base (2)..(2): DNP phosphoramidite base
  misc_feature (2)..(2): n is a, c, g, or t
  modified_base (23)..(23): DNP phosphoramidite base
  misc_feature (23)..(23): n is a, c, g, or t
  modified_base (44)..(44): DNP phosphoramidite base
  misc_feature (44)..(44): n is a, c, g, or t
  modified_base (65)..(65): DNP phosphoramidite base
  misc_feature (65)..(65): n is a, c, g, or t
  modified_base (86)..(86): DNP phosphoramidite base
  misc_feature (86)..(86): n is a, c, g, or t
tntccggttccatttaaaagaanaatactcatggacaataagtngagaaggagcaacatagcttntttgccctctgaactttttcnt

SEQ ID NO: 947 - DNA, 87 bp, Artificial Sequence
  Synthetic Probe
  modified_base (2)..(2): DNP phosphoramidite base
  misc_feature (2)..(2): n is a, c, g, or t
  modified_base (23)..(23): DNP phosphoramidite base
  misc_feature (23)..(23): n is a, c, g, or t
  modified_base (44)..(44): DNP phosphoramidite base
  misc_feature (44)..(44): n is a, c, g, or t
  modified_base (65)..(65): DNP phosphoramidite base
  misc_feature (65)..(65): n is a, c, g, or t
  modified_base (86)..(86): DNP phosphoramidite base
  misc_feature (86)..(86): n is a, c, g, or t
tntacctattatggctaagaatntattttgtagctgaaattctnccatgttcatgaaaactatgntctgtgttttccaatttagant

SEQ ID NO: 948 - DNA, 87 bp, Artificial Sequence
  Synthetic Probe
  modified_base (2)..(2): DNP phosphoramidite base
  misc_feature (2)..(2): n is a, c, g, or t
  modified_base (23)..(23): DNP phosphoramidite base
  misc_feature (23)..(23): n is a, c, g, or t
  modified_base (44)..(44): DNP phosphoramidite base
  misc_feature (44)..(44): n is a, c, g, or t
  modified_base (65)..(65): DNP phosphoramidite base
  misc_feature (65)..(65): n is a, c, g, or t
  modified_base (86)..(86): DNP phosphoramidite base
  misc_feature (86)..(86): n is a, c, g, or t
tngatgcacaaatcattgacaancaacctaaaatttacacaacnagcctatgttctttgcgtganctatctatatttgttcgtagnt

SEQ ID NO: 949 - DNA, 87 bp, Artificial Sequence
  Synthetic Probe
  modified_base (2)..(2): DNP phosphoramidite base
  misc_feature (2)..(2): n is a, c, g, or t
  modified_base (23)..(23): DNP phosphoramidite base
  misc_feature (23)..(23): n is a, c, g, or t
  modified_base (44)..(44): DNP phosphoramidite base
  misc_feature (44)..(44): n is a, c, g, or t
  modified_base (65)..(65): DNP phosphoramidite base
  misc_feature (65)..(65): n is a, c, g, or t
  modified_base (86)..(86): DNP phosphoramidite base
  misc_feature (86)..(86): n is a, c, g, or t
tngagaataagtaaacccctaanctggacagttattccaatatnggagaatttttgctgatgtgnagcaagaattcaaactgtcant

SEQ ID NO: 950 - DNA, 87 bp, Artificial Sequence
  Synthetic Probe
  modified_base (2)..(2): DNP phosphoramidite base
  misc_feature (2)..(2): n is a, c, g, or t
  modified_base (23)..(23): DNP phosphoramidite base
  misc_feature (23)..(23): n is a, c, g, or t
  modified_base (44)..(44): DNP phosphoramidite base
  misc_feature (44)..(44): n is a, c, g, or t
  modified_base (65)..(65): DNP phosphoramidite base
  misc_feature (65)..(65): n is a, c, g, or t
  modified_base (86)..(86): DNP phosphoramidite base
  misc_feature (86)..(86): n is a, c, g, or t
tnaaagtaaagtcacatctgatncttacattctctttgcagganaaacaaacaacaaggaagtantgatctgtgccacaaacttcnt

SEQ ID NO: 951 - DNA, 87 bp, Artificial Sequence
  Synthetic Probe
  modified_base (2)..(2): DNP phosphoramidite base
  misc_feature (2)..(2): n is a, c, g, or t
  modified_base (23)..(23): DNP phosphoramidite base
  misc_feature (23)..(23): n is a, c, g, or t
  modified_base (44)..(44): DNP phosphoramidite base
  misc_feature (44)..(44): n is a, c, g, or t
  modified_base (65)..(65): DNP phosphoramidite base
  misc_feature (65)..(65): n is a, c, g, or t
  modified_base (86)..(86): DNP phosphoramidite base
  misc_feature (86)..(86): n is a, c, g, or t
tnccttcgatgggatctttcctnttcctttaccctgattattantctccagccatcttgctaatncaaatgggcacctgactgccnt

SEQ ID NO: 952 - DNA, 87 bp, Artificial Sequence
  Synthetic Probe
  modified_base (2)..(2): DNP phosphoramidite base
  misc_feature (2)..(2): n is a, c, g, or t
  modified_base (23)..(23): DNP phosphoramidite base
  misc_feature (23)..(23): n is a, c, g, or t
  modified_base (44)..(44): DNP phosphoramidite base
  misc_feature (44)..(44): n is a, c, g, or t
  modified_base (65)..(65): DNP phosphoramidite base
  misc_feature (65)..(65): n is a, c, g, or t
  modified_base (86)..(86): DNP phosphoramidite base
  misc_feature (86)..(86): n is a, c, g, or t
tnattcttattatatttgtttcncctgcaatctcacatagtaangtacccttggtactcccaatnttctcttctctctcttccctnt

SEQ ID NO: 953 - DNA, 87 bp, Artificial Sequence
  Synthetic Probe
  modified_base (2)..(2): DNP phosphoramidite base
  misc_feature (2)..(2): n is a, c, g, or t
  modified_base (23)..(23): DNP phosphoramidite base
  misc_feature (23)..(23): n is a, c, g, or t
  modified_base (44)..(44): DNP phosphoramidite base
  misc_feature (44)..(44): n is a, c, g, or t
  modified_base (65)..(65): DNP phosphoramidite base
  misc_feature (65)..(65): n is a, c, g, or t
  modified_base (86)..(86): DNP phosphoramidite base
  misc_feature (86)..(86): n is a, c, g, or t
tncaggcccactaggtcattcangagagtacaagatccatgccnccacagtcgctgactatcttntcataaacattaagtcaaatnt

SEQ ID NO: 954 - DNA, 87 bp, Artificial Sequence
  Synthetic Probe
  modified_base (2)..(2): DNP phosphoramidite base
  misc_feature (2)..(2): n is a, c, g, or t
  modified_base (23)..(23): DNP phosphoramidite base
  misc_feature (23)..(23): n is a, c, g, or t
  modified_base (44)..(44): DNP phosphoramidite base
  misc_feature (44)..(44): n is a, c, g, or t
  modified_base (65)..(65): DNP phosphoramidite base
  misc_feature (65)..(65): n is a, c, g, or t
  modified_base (86)..(86): DNP phosphoramidite base
  misc_feature (86)..(86): n is a, c, g, or t
tntatgcagggtagtgggcaatngcctccttttatacaatatcnattttatttttattaactttngtcatttttgtagtcggctgnt

SEQ ID NO: 955 - DNA, 87 bp, Artificial Sequence
  Synthetic Probe
  modified_base (2)..(2): DNP phosphoramidite base
  misc_feature (2)..(2): n is a, c, g, or t
  modified_base (23)..(23): DNP phosphoramidite base
  misc_feature (23)..(23): n is a, c, g, or t
  modified_base (44)..(44): DNP phosphoramidite base
  misc_feature (44)..(44): n is a, c, g, or t
  modified_base (65)..(65): DNP phosphoramidite base
  misc_feature (65)..(65): n is a, c, g, or t
  modified_base (86)..(86): DNP phosphoramidite base
  misc_feature (86)..(86): n is a, c, g, or t
tnccagctattaatcatgaattnaaagcctaccttctaactganatatgaactgttaatcataantgaattataattatcaatcant

SEQ ID NO: 956 - DNA, 87 bp, Artificial Sequence
  Synthetic Probe
  modified_base (2)..(2): DNP phosphoramidite base
  misc_feature (2)..(2): n is a, c, g, or t
  modified_base (23)..(23): DNP phosphoramidite base
  misc_feature (23)..(23): n is a, c, g, or t
  modified_base (44)..(44): DNP phosphoramidite base
  misc_feature (44)..(44): n is a, c, g, or t
  modified_base (65)..(65): DNP phosphoramidite base
  misc_feature (65)..(65): n is a, c, g, or t
  modified_base (86)..(86): DNP phosphoramidite base
  misc_feature (86)..(86): n is a, c, g, or t
tngcaaagttaagtgaccacatntcccattaacattctggcagncaaggaatcagttctctctgntaaggacatgctacaccacgnt

SEQ ID NO: 957 - DNA, 87 bp, Artificial Sequence
  Synthetic Probe
  modified_base (2)..(2): DNP phosphoramidite base
  misc_feature (2)..(2): n is a, c, g, or t
  modified_base (23)..(23): DNP phosphoramidite base
  misc_feature (23)..(23): n is a, c, g, or t
  modified_base (44)..(44): DNP phosphoramidite base
  misc_feature (44)..(44): n is a, c, g, or t
  modified_base (65)..(65): DNP phosphoramidite base
  misc_feature (65)..(65): n is a, c, g, or t
  modified_base (86)..(86): DNP phosphoramidite base
  misc_feature (86)..(86): n is a, c, g, or t
tnttctgaagatataaacttaanatctcttctccagagccacantctgtgagataaaaaaatgancaccacatcactgagttattnt

SEQ ID NO: 958 - DNA, 87 bp, Artificial Sequence
  Synthetic Probe
  modified_base (2)..(2): DNP phosphoramidite base
  misc_feature (2)..(2): n is a, c, g, or t
  modified_base (23)..(23): DNP phosphoramidite base
  misc_feature (23)..(23): n is a, c, g, or t
  modified_base (44)..(44): DNP phosphoramidite base
  misc_feature (44)..(44): n is a, c, g, or t
  modified_base (65)..(65): DNP phosphoramidite base
  misc_feature (65)..(65): n is a, c, g, or t
  modified_base (86)..(86): DNP phosphoramidite base
  misc_feature (86)..(86): n is a, c, g, or t
tnagcagcctgaatactcacagnctccctctgcatgaggggctngatatgaactcctctttccangaggttttgctgaatgtgcant

SEQ ID NO: 959 - DNA, 87 bp, Artificial Sequence
  Synthetic Probe
  modified_base (2)..(2): DNP phosphoramidite base
  misc_feature (2)..(2): n is a, c, g, or t
  modified_base (23)..(23): DNP phosphoramidite base
  misc_feature (23)..(23): n is a, c, g, or t
  modified_base (44)..(44): DNP phosphoramidite base
  misc_feature (44)..(44): n is a, c, g, or t
  modified_base (65)..(65): DNP phosphoramidite base
  misc_feature (65)..(65): n is a, c, g, or t
  modified_base (86)..(86): DNP phosphoramidite base
  misc_feature (86)..(86): n is a, c, g, or t
tngtagcaaatttctcttgttanacattattttatgggtagaanccatgagatgctaagaaattnggacaatttacctaagattgnt

SEQ ID NO: 960 - DNA, 87 bp, Artificial Sequence
  Synthetic Probe
  modified_base (2)..(2): DNP phosphoramidite base
  misc_feature (2)..(2): n is a, c, g, or t
  modified_base (23)..(23): DNP phosphoramidite base
  misc_feature (23)..(23): n is a, c, g, or t
  modified_base (44)..(44): DNP phosphoramidite base
  misc_feature (44)..(44): n is a, c, g, or t
  modified_base (65)..(65): DNP phosphoramidite base
  misc_feature (65)..(65): n is a, c, g, or t
  modified_base (86)..(86): DNP phosphoramidite base
  misc_feature (86)..(86): n is a, c, g, or t
tntctgaatttaaagtagaaaangattagtatgtaaaagcccanatagttgagatttttgtcatnccaaacaaaagtcaaggtaant

SEQ ID NO: 961 - DNA, 87 bp, Artificial Sequence
  Synthetic Probe
  modified_base (2)..(2): DNP phosphoramidite base
  misc_feature (2)..(2): n is a, c, g, or t
  modified_base (23)..(23): DNP phosphoramidite base
  misc_feature (23)..(23): n is a, c, g, or t
  modified_base (44)..(44): DNP phosphoramidite base
  misc_feature (44)..(44): n is a, c, g, or t
  modified_base (65)..(65): DNP phosphoramidite base
  misc_feature (65)..(65): n is a, c, g, or t
  modified_base (86)..(86): DNP phosphoramidite base
  misc_feature (86)..(86): n is a, c, g, or t
tnttcaagataaactcatattanatagcaaggtaatgtccaaanttaataccaagggcaacagantacatcactgtttgtagagant

SEQ ID NO: 962 - DNA, 87 bp, Artificial Sequence
  Synthetic Probe
  modified_base (2)..(2): DNP phosphoramidite base
  misc_feature (2)..(2): n is a, c, g, or t
  modified_base (23)..(23): DNP phosphoramidite base
  misc_feature (23)..(23): n is a, c, g, or t
  modified_base (44)..(44): DNP phosphoramidite base
  misc_feature (44)..(44): n is a, c, g, or t
  modified_base (65)..(65): DNP phosphoramidite base
  misc_feature (65)..(65): n is a, c, g, or t
  modified_base (86)..(86): DNP phosphoramidite base
  misc_feature (86)..(86): n is a, c, g, or t
tntttgcaatgaattaaattatnaacttcaggtaaatgatgttncatcctctggatatatgatgnttcatcctctggatatttttnt

SEQ ID NO: 963 - DNA, 87 bp, Artificial Sequence
  Synthetic Probe
  modified_base (2)..(2): DNP phosphoramidite base
  misc_feature (2)..(2): n is a, c, g, or t
  modified_base (23)..(23): DNP phosphoramidite base
  misc_feature (23)..(23): n is a, c, g, or t
  modified_base (44)..(44): DNP phosphoramidite base
  misc_feature (44)..(44): n is a, c, g, or t
  modified_base (65)..(65): DNP phosphoramidite base
  misc_feature (65)..(65): n is a, c, g, or t
  modified_base (86)..(86): DNP phosphoramidite base
  misc_feature (86)..(86): n is a, c, g, or t
tntaagagcagaattgtgcatcnttttccactggaaagtcacanaacatggttaaatttaagtangactctgtgtgcttgcatgtnt

SEQ ID NO: 964 - DNA, 87 bp, Artificial Sequence
  Synthetic Probe
  modified_base (2)..(2): DNP phosphoramidite base
  misc_feature (2)..(2): n is a, c, g, or t
  modified_base (23)..(23): DNP phosphoramidite base
  misc_feature (23)..(23): n is a, c, g, or t
  modified_base (44)..(44): DNP phosphoramidite base
  misc_feature (44)..(44): n is a, c, g, or t
  modified_base (65)..(65): DNP phosphoramidite base
  misc_feature (65)..(65): n is a, c, g, or t
  modified_base (86)..(86): DNP phosphoramidite base
  misc_feature (86)..(86): n is a, c, g, or t
tntcagctcttcctaaatagtancttgcttaaagacccacaaanggtgctccagcagagtgtttnatcagaaactacagttaactnt

SEQ ID NO: 965 - DNA, 87 bp, Artificial Sequence
  Synthetic Probe
  modified_base (2)..(2): DNP phosphoramidite base
  misc_feature (2)..(2): n is a, c, g, or t
  modified_base (23)..(23): DNP phosphoramidite base
  misc_feature (23)..(23): n is a, c, g, or t
  modified_base (44)..(44): DNP phosphoramidite base
  misc_feature (44)..(44): n is a, c, g, or t
  modified_base (65)..(65): DNP phosphoramidite base
  misc_feature (65)..(65): n is a, c, g, or t
  modified_base (86)..(86): DNP phosphoramidite base
  misc_feature (86)..(86): n is a, c, g, or t
tnagcagaaaactcatgaactgncctggaggtagcatctgaaanaggagaagccgttacacacanattcttttcctcaccccactnt

SEQ ID NO: 966 - DNA, 87 bp, Artificial Sequence
  Synthetic Probe
  modified_base (2)..(2): DNP phosphoramidite base
  misc_feature (2)..(2): n is a, c, g, or t
  modified_base (23)..(23): DNP phosphoramidite base
  misc_feature (23)..(23): n is a, c, g, or t
  modified_base (44)..(44): DNP phosphoramidite base
  misc_feature (44)..(44): n is a, c, g, or t
  modified_base (65)..(65): DNP phosphoramidite base
  misc_feature (65)..(65): n is a, c, g, or t
  modified_base (86)..(86): DNP phosphoramidite base
  misc_feature (86)..(86): n is a, c, g, or t
tntagtgttttctccgttcaganagcaggggactaattataagnaaaacacttagcagattgaanctgaggcattaacataggggnt

SEQ ID NO: 967 - DNA, 87 bp, Artificial Sequence
  Synthetic Probe
  modified_base (2)..(2): DNP phosphoramidite base
  misc_feature (2)..(2): n is a, c, g, or t
  modified_base (23)..(23): DNP phosphoramidite base
  misc_feature (23)..(23): n is a, c, g, or t
  modified_base (44)..(44): DNP phosphoramidite base
  misc_feature (44)..(44): n is a, c, g, or t
  modified_base (65)..(65): DNP phosphoramidite base
  misc_feature (65)..(65): n is a, c, g, or t
  modified_base (86)..(86): DNP phosphoramidite base
  misc_feature (86)..(86): n is a, c, g, or t
tngttaattagcatttccacccntggggaaactcaaagacgttntccgctgaccttcatgagctnaagttaaccaaatcttgcatnt

SEQ ID NO: 968 - DNA, 87 bp, Artificial Sequence
  Synthetic Probe
  modified_base (2)..(2): DNP phosphoramidite base
  misc_feature (2)..(2): n is a, c, g, or t
  modified_base (23)..(23): DNP phosphoramidite base
  misc_feature (23)..(23): n is a, c, g, or t
  modified_base (44)..(44): DNP phosphoramidite base
  misc_feature (44)..(44): n is a, c, g, or t
  modified_base (65)..(65): DNP phosphoramidite base
  misc_feature (65)..(65): n is a, c, g, or t
  modified_base (86)..(86): DNP phosphoramidite base
  misc_feature (86)..(86): n is a, c, g, or t
tncctaagaagtctaattttaancggttgcttagaatacattantagactaactcattatagatncctcaactctggcctctcatnt

SEQ ID NO: 969 - DNA, 87 bp, Artificial Sequence
  Synthetic Probe
  modified_base (2)..(2): DNP phosphoramidite base
  misc_feature (2)..(2): n is a, c, g, or t
  modified_base (23)..(23): DNP phosphoramidite base
  misc_feature (23)..(23): n is a, c, g, or t
  modified_base (44)..(44): DNP phosphoramidite base
  misc_feature (44)..(44): n is a, c, g, or t
  modified_base (65)..(65): DNP phosphoramidite base
  misc_feature (65)..(65): n is a, c, g, or t
  modified_base (86)..(86): DNP phosphoramidite base
  misc_feature (86)..(86): n is a, c, g, or t
tncaaggacaaatttctgccaanggaattagactgaaaagatgntagtgccacatatgtgcatgncttttgttaatatgtatgagnt

SEQ ID NO: 970 - DNA, 87 bp, Artificial Sequence
  Synthetic Probe
  modified_base (2)..(2): DNP phosphoramidite base
  misc_feature (2)..(2): n is a, c, g, or t
  modified_base (23)..(23): DNP phosphoramidite base
  misc_feature (23)..(23): n is a, c, g, or t
  modified_base (44)..(44): DNP phosphoramidite base
  misc_feature (44)..(44): n is a, c, g, or t
  modified_base (65)..(65): DNP phosphoramidite base
  misc_feature (65)..(65): n is a, c, g, or t
  modified_base (86)..(86): DNP phosphoramidite base
  misc_feature (86)..(86): n is a, c, g, or t
tnccctaggaatcattatgaggnctccaaatcgttctgagaaanagaaatatatttgtaaacacnaagtacataaaatatttacant

SEQ ID NO: 971 - DNA, 87 bp, Artificial Sequence
  Synthetic Probe
  modified_base (2)..(2): DNP phosphoramidite base
  misc_feature (2)..(2): n is a, c, g, or t
  modified_base (23)..(23): DNP phosphoramidite base
  misc_feature (23)..(23): n is a, c, g, or t
  modified_base (44)..(44): DNP phosphoramidite base
  misc_feature (44)..(44): n is a, c, g, or t
  modified_base (65)..(65): DNP phosphoramidite base
  misc_feature (65)..(65): n is a, c, g, or t
  modified_base (86)..(86): DNP phosphoramidite base
  misc_feature (86)..(86): n is a, c, g, or t
tnttctgtgatcatcaaatacantcttcattgggaggaagagtnactgaagacaataaaacagcncttcacaaatacacagggggnt

SEQ ID NO: 972 - DNA, 87 bp, Artificial Sequence
  Synthetic Probe
  modified_base (2)..(2): DNP phosphoramidite base
  misc_feature (2)..(2): n is a, c, g, or t
  modified_base (23)..(23): DNP phosphoramidite base
  misc_feature (23)..(23): n is a, c, g, or t
  modified_base (44)..(44): DNP phosphoramidite base
  misc_feature (44)..(44): n is a, c, g, or t
  modified_base (65)..(65): DNP phosphoramidite base
  misc_feature (65)..(65): n is a, c, g, or t
  modified_base (86)..(86): DNP phosphoramidite base
  misc_feature (86)..(86): n is a, c, g, or t
tngaaacactgtagaaagaatcnattgttaatatcctaatatgncaagactaatcagatgttatntcattcattcagtcattcacnt

SEQ ID NO: 973 - DNA, 87 bp, Artificial Sequence
  Synthetic Probe
  modified_base (2)..(2): DNP phosphoramidite base
  misc_feature (2)..(2): n is a, c, g, or t
  modified_base (23)..(23): DNP phosphoramidite base
  misc_feature (23)..(23): n is a, c, g, or t
  modified_base (44)..(44): DNP phosphoramidite base
  misc_feature (44)..(44): n is a, c, g, or t
  modified_base (65)..(65): DNP phosphoramidite base
  misc_feature (65)..(65): n is a, c, g, or t
  modified_base (86)..(86): DNP phosphoramidite base
  misc_feature (86)..(86): n is a, c, g, or t
tnaattaagctattctacaagtngtgtgaaaaagttggaagaancgatgttttaatagccctganatcaaatttataatagtattnt

SEQ ID NO: 974 - DNA, 87 bp, Artificial Sequence
  Synthetic Probe
  modified_base (2)..(2): DNP phosphoramidite base
  misc_feature (2)..(2): n is a, c, g, or t
  modified_base (23)..(23): DNP phosphoramidite base
  misc_feature (23)..(23): n is a, c, g, or t
  modified_base (44)..(44): DNP phosphoramidite base
  misc_feature (44)..(44): n is a, c, g, or t
  modified_base (65)..(65): DNP phosphoramidite base
  misc_feature (65)..(65): n is a, c, g, or t
  modified_base (86)..(86): DNP phosphoramidite base
  misc_feature (86)..(86): n is a, c, g, or t
tngaaattgcttgcaatttgtgnactatgttaaacaacatctanaacaaagtcaagctcctctanagtgcaaacaatacgtgggant

SEQ ID NO: 975 - DNA, 87 bp, Artificial Sequence
  Synthetic Probe
  modified_base (2)..(2): DNP phosphoramidite base
  misc_feature (2)..(2): n is a, c, g, or t
  modified_base (23)..(23): DNP phosphoramidite base
  misc_feature (23)..(23): n is a, c, g, or t
  modified_base (44)..(44): DNP phosphoramidite base
  misc_feature (44)..(44): n is a, c, g, or t
  modified_base (65)..(65): DNP phosphoramidite base
  misc_feature (65)..(65): n is a, c, g, or t
  modified_base (86)..(86): DNP phosphoramidite base
  misc_feature (86)..(86): n is a, c, g, or t
tntgctggggagagtgtgcgttntactttcactacaaaatgttnttggagtaaaacttcattttngaaatataaagattttgttgnt

SEQ ID NO: 976 - DNA, 87 bp, Artificial Sequence
  Synthetic Probe
  modified_base (2)..(2): DNP phosphoramidite base
  misc_feature (2)..(2): n is a, c, g, or t
  modified_base (23)..(23): DNP phosphoramidite base
  misc_feature (23)..(23): n is a, c, g, or t
  modified_base (44)..(44): DNP phosphoramidite base
  misc_feature (44)..(44): n is a, c, g, or t
  modified_base (65)..(65): DNP phosphoramidite base
  misc_feature (65)..(65): n is a, c, g, or t
  modified_base (86)..(86): DNP phosphoramidite base
  misc_feature (86)..(86): n is a, c, g, or t
tngtagtgtctctttcaaatatnagctttatctcctgggggatnggtgaagggatcagagtaaangtctgtgattattactttccnt

SEQ ID NO: 977 - DNA, 87 bp, Artificial Sequence
  Synthetic Probe
  modified_base (2)..(2): DNP phosphoramidite base
  misc_feature (2)..(2): n is a, c, g, or t
  modified_base (23)..(23): DNP phosphoramidite base
  misc_feature (23)..(23): n is a, c, g, or t
  modified_base (44)..(44): DNP phosphoramidite base
  misc_feature (44)..(44): n is a, c, g, or t
  modified_base (65)..(65): DNP phosphoramidite base
  misc_feature (65)..(65): n is a, c, g, or t
  modified_base (86)..(86): DNP phosphoramidite base
  misc_feature (86)..(86): n is a, c, g, or t
tnaagcatatgcttattttaatngagaacgaaaaagaaagcttnaactctttttaaactcgttanaaaatggagttatttactgtnt

SEQ ID NO: 978 - DNA, 87 bp, Artificial Sequence
  Synthetic Probe
  modified_base (2)..(2): DNP phosphoramidite base
  misc_feature (2)..(2): n is a, c, g, or t
  modified_base (23)..(23): DNP phosphoramidite base
  misc_feature (23)..(23): n is a, c, g, or t
  modified_base (44)..(44): DNP phosphoramidite base
  misc_feature (44)..(44): n is a, c, g, or t
  modified_base (65)..(65): DNP phosphoramidite base
  misc_feature (65)..(65): n is a, c, g, or t
  modified_base (86)..(86): DNP phosphoramidite base
  misc_feature (86)..(86): n is a, c, g, or t
tnaaagacgtcttacagcaattnaggaagaatatacattgcatngaaaggccttttgaaacgttntatctatttgatgattgctgnt

SEQ ID NO: 979 - DNA, 87 bp, Artificial Sequence
  Synthetic Probe
  modified_base (2)..(2): DNP phosphoramidite base
  misc_feature (2)..(2): n is a, c, g, or t
  modified_base (23)..(23): DNP phosphoramidite base
  misc_feature (23)..(23): n is a, c, g, or t
  modified_base (44)..(44): DNP phosphoramidite base
  misc_feature (44)..(44): n is a, c, g, or t
  modified_base (65)..(65): DNP phosphoramidite base
  misc_feature (65)..(65): n is a, c, g, or t
  modified_base (86)..(86): DNP phosphoramidite base
  misc_feature (86)..(86): n is a, c, g, or t
tnactgcctgttgtatgtattcntattttgtgcatagactttcnttgttggttgaaaaaaatgancaggtggaaagatgttggttnt

SEQ ID NO: 980 - DNA, 87 bp, Artificial Sequence
  Synthetic Probe
  modified_base (2)..(2): DNP phosphoramidite base
  misc_feature (2)..(2): n is a, c, g, or t
  modified_base (23)..(23): DNP phosphoramidite base
  misc_feature (23)..(23): n is a, c, g, or t
  modified_base (44)..(44): DNP phosphoramidite base
  misc_feature (44)..(44): n is a, c, g, or t
  modified_base (65)..(65): DNP phosphoramidite base
  misc_feature (65)..(65): n is a, c, g, or t
  modified_base (86)..(86): DNP phosphoramidite base
  misc_feature (86)..(86): n is a, c, g, or t
tntgttacatatgtcgtttgtantttcagagggaggggggactngtgataggttgcttgtgattncagaatcttcctgctaagaant

SEQ ID NO: 981 - DNA, 87 bp, Artificial Sequence
  Synthetic Probe
  modified_base (2)..(2): DNP phosphoramidite base
  misc_feature (2)..(2): n is a, c, g, or t
  modified_base (23)..(23): DNP phosphoramidite base
  misc_feature (23)..(23): n is a, c, g, or t
  modified_base (44)..(44): DNP phosphoramidite base
  misc_feature (44)..(44): n is a, c, g, or t
  modified_base (65)..(65): DNP phosphoramidite base
  misc_feature (65)..(65): n is a, c, g, or t
  modified_base (86)..(86): DNP phosphoramidite base
  misc_feature (86)..(86): n is a, c, g, or t
tngctgttatgcacacaaaaggncacataaaaatgattgctaanaatgaaggatggttagcattntttggtcttgagtaggcatcnt

SEQ ID NO: 982 - DNA, 87 bp, Artificial Sequence
  Synthetic Probe
  modified_base (2)..(2): DNP phosphoramidite base
  misc_feature (2)..(2): n is a, c, g, or t
  modified_base (23)..(23): DNP phosphoramidite base
  misc_feature (23)..(23): n is a, c, g, or t
  modified_base (44)..(44): DNP phosphoramidite base
  misc_feature (44)..(44): n is a, c, g, or t
  modified_base (65)..(65): DNP phosphoramidite base
  misc_feature (65)..(65): n is a, c, g, or t
  modified_base (86)..(86): DNP phosphoramidite base
  misc_feature (86)..(86): n is a, c, g, or t
tnttaataccacgcttggtttcncttttcttacttttattcttncaagttgcaaagaacttgagnatgcattctgaaataacaagnt

SEQ ID NO: 983 - DNA, 87 bp, Artificial Sequence
  Synthetic Probe
  modified_base (2)..(2): DNP phosphoramidite base
  misc_feature (2)..(2): n is a, c, g, or t
  modified_base (23)..(23): DNP phosphoramidite base
  misc_feature (23)..(23): n is a, c, g, or t
  modified_base (44)..(44): DNP phosphoramidite base
  misc_feature (44)..(44): n is a, c, g, or t
  modified_base (65)..(65): DNP phosphoramidite base
  misc_feature (65)..(65): n is a, c, g, or t
  modified_base (86)..(86): DNP phosphoramidite base
  misc_feature (86)..(86): n is a, c, g, or t
tnagactacttaacatgttcggnctgagtgttttcagtgttctnccctgatacttttagagtatnttagaacatgaagtgtgaagnt

SEQ ID NO: 984 - DNA, 87 bp, Artificial Sequence
  Synthetic Probe
  modified_base (2)..(2): DNP phosphoramidite base
  misc_feature (2)..(2): n is a, c, g, or t
  modified_base (23)..(23): DNP phosphoramidite base
  misc_feature (23)..(23): n is a, c, g, or t
  modified_base (44)..(44): DNP phosphoramidite base
  misc_feature (44)..(44): n is a, c, g, or t
  modified_base (65)..(65): DNP phosphoramidite base
  misc_feature (65)..(65): n is a, c, g, or t
  modified_base (86)..(86): DNP phosphoramidite base
  misc_feature (86)..(86): n is a, c, g, or t
tnctctttttgatttttgaatgncagtgaattgagatggttacntcaaggaatgattgtttacanttgttaggtgaggcgtttgant

SEQ ID NO: 985 - DNA, 87 bp, Artificial Sequence
  Synthetic Probe
  modified_base (2)..(2): DNP phosphoramidite base
  misc_feature (2)..(2): n is a, c, g, or t
  modified_base (23)..(23): DNP phosphoramidite base
  misc_feature (23)..(23): n is a, c, g, or t
  modified_base (44)..(44): DNP phosphoramidite base
  misc_feature (44)..(44): n is a, c, g, or t
  modified_base (65)..(65): DNP phosphoramidite base
  misc_feature (65)..(65): n is a, c, g, or t
  modified_base (86)..(86): DNP phosphoramidite base
  misc_feature (86)..(86): n is a, c, g, or t
tnacagtgtttctttttttatantatacacaaaataaaatgacnttaaacatgtggtttattgtnaattatccagttctcacaatnt

SEQ ID NO: 986 - DNA, 87 bp, Artificial Sequence
  Synthetic Probe
  modified_base (2)..(2): DNP phosphoramidite base
  misc_feature (2)..(2): n is a, c, g, or t
  modified_base (23)..(23): DNP phosphoramidite base
  misc_feature (23)..(23): n is a, c, g, or t
  modified_base (44)..(44): DNP phosphoramidite base
  misc_feature (44)..(44): n is a, c, g, or t
  modified_base (65)..(65): DNP phosphoramidite base
  misc_feature (65)..(65): n is a, c, g, or t
  modified_base (86)..(86): DNP phosphoramidite base
  misc_feature (86)..(86): n is a, c, g, or t
tnttctgccttgaaacctgactnggaaaacaatctgaaatacanaacagaggcatcatttaacancttttcttataccatagattnt

SEQ ID NO: 987 - DNA, 87 bp, Artificial Sequence
  Synthetic Probe
  modified_base (2)..(2): DNP phosphoramidite base
  misc_feature (2)..(2): n is a, c, g, or t
  modified_base (23)..(23): DNP phosphoramidite base
  misc_feature (23)..(23): n is a, c, g, or t
  modified_base (44)..(44): DNP phosphoramidite base
  misc_feature (44)..(44): n is a, c, g, or t
  modified_base (65)..(65): DNP phosphoramidite base
  misc_feature (65)..(65): n is a, c, g, or t
  modified_base (86)..(86): DNP phosphoramidite base
  misc_feature (86)..(86): n is a, c, g, or t
tntctcgttttttagattgaaanagatatgaatgagtatcctanaaaaaagaaaaaggaagactnctacacccttctcgttattcnt

SEQ ID NO: 988 - DNA, 87 bp, Artificial Sequence
  Synthetic Probe
  modified_base (2)..(2): DNP phosphoramidite base
  misc_feature (2)..(2): n is a, c, g, or t
  modified_base (23)..(23): DNP phosphoramidite base
  misc_feature (23)..(23): n is a, c, g, or t
  modified_base (44)..(44): DNP phosphoramidite base
  misc_feature (44)..(44): n is a, c, g, or t
  modified_base (65)..(65): DNP phosphoramidite base
  misc_feature (65)..(65): n is a, c, g, or t
  modified_base (86)..(86): DNP phosphoramidite base
  misc_feature (86)..(86): n is a, c, g, or t
tntatgttttagagtatgtaatnttgtggttctttcaaagtccntatgtcaatattggatctganaatataaaagctttaaaagtnt

SEQ ID NO: 989 - DNA, 87 bp, Artificial Sequence
  Synthetic Probe
  modified_base (2)..(2): DNP phosphoramidite base
  misc_feature (2)..(2): n is a, c, g, or t
  modified_base (23)..(23): DNP phosphoramidite base
  misc_feature (23)..(23): n is a, c, g, or t
  modified_base (44)..(44): DNP phosphoramidite base
  misc_feature (44)..(44): n is a, c, g, or t
  modified_base (65)..(65): DNP phosphoramidite base
  misc_feature (65)..(65): n is a, c, g, or t
  modified_base (86)..(86): DNP phosphoramidite base
  misc_feature (86)..(86): n is a, c, g, or t
tngggaagtttctcattaaatantgtatgtttactgtacttganaatatttttcattttatgttncagattcctctggaataagcnt

SEQ ID NO: 990 - DNA, 87 bp, Artificial Sequence
  Synthetic Probe
  modified_base (2)..(2): DNP phosphoramidite base
  misc_feature (2)..(2): n is a, c, g, or t
  modified_base (23)..(23): DNP phosphoramidite base
  misc_feature (23)..(23): n is a, c, g, or t
  modified_base (44)..(44): DNP phosphoramidite base
  misc_feature (44)..(44): n is a, c, g, or t
  modified_base (65)..(65): DNP phosphoramidite base
  misc_feature (65)..(65): n is a, c, g, or t
  modified_base (86)..(86): DNP phosphoramidite base
  misc_feature (86)..(86): n is a, c, g, or t
tnagaattgcagatggattcaantggaattttctctgatcattngttacagtgtctgttctatgnagacagccagatttaaaatant

SEQ ID NO: 991 - DNA, 87 bp, Artificial Sequence
  Synthetic Probe
  modified_base (2)..(2): DNP phosphoramidite base
  misc_feature (2)..(2): n is a, c, g, or t
  modified_base (23)..(23): DNP phosphoramidite base
  misc_feature (23)..(23): n is a, c, g, or t
  modified_base (44)..(44): DNP phosphoramidite base
  misc_feature (44)..(44): n is a, c, g, or t
  modified_base (65)..(65): DNP phosphoramidite base
  misc_feature (65)..(65): n is a, c, g, or t
  modified_base (86)..(86): DNP phosphoramidite base
  misc_feature (86)..(86): n is a, c, g, or t
tntatatctaatattttcgaaanatatgtttctttaaactgctntttacattttttattccttancttgaaaatgtgggtaaaatnt

SEQ ID NO: 992 - DNA, 87 bp, Artificial Sequence
  Synthetic Probe
  modified_base (2)..(2): DNP phosphoramidite base
  misc_feature (2)..(2): n is a, c, g, or t
  modified_base (23)..(23): DNP phosphoramidite base
  misc_feature (23)..(23): n is a, c, g, or t
  modified_base (44)..(44): DNP phosphoramidite base
  misc_feature (44)..(44): n is a, c, g, or t
  modified_base (65)..(65): DNP phosphoramidite base
  misc_feature (65)..(65): n is a, c, g, or t
  modified_base (86)..(86): DNP phosphoramidite base
  misc_feature (86)..(86): n is a, c, g, or t
tnataaatttttttttgcccagnttgtatttaacagatcttatnttagttatagtcatataatanggtttgttttattcttcagant

SEQ ID NO: 993 - DNA, 87 bp, Artificial Sequence
  Synthetic Probe
  modified_base (2)..(2): DNP phosphoramidite base
  misc_feature (2)..(2): n is a, c, g, or t
  modified_base (23)..(23): DNP phosphoramidite base
  misc_feature (23)..(23): n is a, c, g, or t
  modified_base (44)..(44): DNP phosphoramidite base
  misc_feature (44)..(44): n is a, c, g, or t
  modified_base (65)..(65): DNP phosphoramidite base
  misc_feature (65)..(65): n is a, c, g, or t
  modified_base (86)..(86): DNP phosphoramidite base
  misc_feature (86)..(86): n is a, c, g, or t
tnatatagagacagaaaacaatntcctctgagagtctccaaganccaaactgatgaagaaccgcncagctaaactttgtaaaattnt

SEQ ID NO: 994 - DNA, 87 bp, Artificial Sequence
  Synthetic Probe
  modified_base (2)..(2): DNP phosphoramidite base
  misc_feature (2)..(2): n is a, c, g, or t
  modified_base (23)..(23): DNP phosphoramidite base
  misc_feature (23)..(23): n is a, c, g, or t
  modified_base (44)..(44): DNP phosphoramidite base
  misc_feature (44)..(44): n is a, c, g, or t
  modified_base (65)..(65): DNP phosphoramidite base
  misc_feature (65)..(65): n is a, c, g, or t
  modified_base (86)..(86): DNP phosphoramidite base
  misc_feature (86)..(86): n is a, c, g, or t
tnttgtgagtttaacagcaaatnatttttctgacttaaagcagncatatgatcctgaagcataanacgtactgattcaaatgtgtnt

SEQ ID NO: 995 - DNA, 87 bp, Artificial Sequence
  Synthetic Probe
  modified_base (2)..(2): DNP phosphoramidite base
  misc_feature (2)..(2): n is a, c, g, or t
  modified_base (23)..(23): DNP phosphoramidite base
  misc_feature (23)..(23): n is a, c, g, or t
  modified_base (44)..(44): DNP phosphoramidite base
  misc_feature (44)..(44): n is a, c, g, or t
  modified_base (65)..(65): DNP phosphoramidite base
  misc_feature (65)..(65): n is a, c, g, or t
  modified_base (86)..(86): DNP phosphoramidite base
  misc_feature (86)..(86): n is a, c, g, or t
tngtgataagtataacaatggtngaacatggacagtatagcctncttaagcaaaattacctttgnacaaatgtaaaaacttctttnt

SEQ ID NO: 996 - DNA, 87 bp, Artificial Sequence
  Synthetic Probe
  modified_base (2)..(2): DNP phosphoramidite base
  misc_feature (2)..(2): n is a, c, g, or t
  modified_base (23)..(23): DNP phosphoramidite base
  misc_feature (23)..(23): n is a, c, g, or t
  modified_base (44)..(44): DNP phosphoramidite base
  misc_feature (44)..(44): n is a, c, g, or t
  modified_base (65)..(65): DNP phosphoramidite base
  misc_feature (65)..(65): n is a, c, g, or t
  modified_base (86)..(86): DNP phosphoramidite base
  misc_feature (86)..(86): n is a, c, g, or t
tngtatgtcaagtatgtggtttntcggagtagacttcacacaanatgttaacaggcatgttgctnattgaacatacaaaaattttnt

SEQ ID NO: 997 - DNA, 87 bp, Artificial Sequence
  Synthetic Probe
  modified_base (2)..(2): DNP phosphoramidite base
  misc_feature (2)..(2): n is a, c, g, or t
  modified_base (23)..(23): DNP phosphoramidite base
  misc_feature (23)..(23): n is a, c, g, or t
  modified_base (44)..(44): DNP phosphoramidite base
  misc_feature (44)..(44): n is a, c, g, or t
  modified_base (65)..(65): DNP phosphoramidite base
  misc_feature (65)..(65): n is a, c, g, or t
  modified_base (86)..(86): DNP phosphoramidite base
  misc_feature (86)..(86): n is a, c, g, or t
tnatgtttgtgatgactgtgggnaaaggcttttcaagtatgctnagaatattgcaagcatttaanattcacatttatctgaagggnt

SEQ ID NO: 998 - DNA, 87 bp, Artificial Sequence
  Synthetic Probe
  modified_base (2)..(2): DNP phosphoramidite base
  misc_feature (2)..(2): n is a, c, g, or t
  modified_base (23)..(23): DNP phosphoramidite base
  misc_feature (23)..(23): n is a, c, g, or t
  modified_base (44)..(44): DNP phosphoramidite base
  misc_feature (44)..(44): n is a, c, g, or t
  modified_base (65)..(65): DNP phosphoramidite base
  misc_feature (65)..(65): n is a, c, g, or t
  modified_base (86)..(86): DNP phosphoramidite base
  misc_feature (86)..(86): n is a, c, g, or t
tnttgaagatcttaaaattcatnctagatttcaagcattcagcntgacttgcctcataaatgtangtgactgcttgatgaggtttnt

SEQ ID NO: 999 - DNA, 87 bp, Artificial Sequence
  Synthetic Probe
  modified_base (2)..(2): DNP phosphoramidite base
  misc_feature (2)..(2): n is a, c, g, or t
  modified_base (23)..(23): DNP phosphoramidite base
  misc_feature (23)..(23): n is a, c, g, or t
  modified_base (44)..(44): DNP phosphoramidite base
  misc_feature (44)..(44): n is a, c, g, or t
  modified_base (65)..(65): DNP phosphoramidite base
  misc_feature (65)..(65): n is a, c, g, or t
  modified_base (86)..(86): DNP phosphoramidite base
  misc_feature (86)..(86): n is a, c, g, or t
tnaattttctggataacgaattntccatactaaagcatcagtcnaccaccaattccttattaagnttaattctccttagtaacttnt

SEQ ID NO: 1000 - DNA, 87 bp, Artificial Sequence
  Synthetic Probe
  modified_base (2)..(2): DNP phosphoramidite base
  misc_feature (2)..(2): n is a, c, g, or t
  modified_base (23)..(23): DNP phosphoramidite base
  misc_feature (23)..(23): n is a, c, g, or t
  modified_base (44)..(44): DNP phosphoramidite base
  misc_feature (44)..(44): n is a, c, g, or t
  modified_base (65)..(65): DNP phosphoramidite base
  misc_feature (65)..(65): n is a, c, g, or t
  modified_base (86)..(86): DNP phosphoramidite base
  misc_feature (86)..(86): n is a, c, g, or t
tntggtgttaaagtggtaactantctgaacccaaaataaatttngtgaagagtaatttattcatntctaaaaagaaattttcttant

SEQ ID NO: 1001 - DNA, 87 bp, Artificial Sequence
  Synthetic Probe
  modified_base (2)..(2): DNP phosphoramidite base
  misc_feature (2)..(2): n is a, c, g, or t
  modified_base (23)..(23): DNP phosphoramidite base
  misc_feature (23)..(23): n is a, c, g, or t
  modified_base (44)..(44): DNP phosphoramidite base
  misc_feature (44)..(44): n is a, c, g, or t
  modified_base (65)..(65): DNP phosphoramidite base
  misc_feature (65)..(65): n is a, c, g, or t
  modified_base (86)..(86): DNP phosphoramidite base
  misc_feature (86)..(86): n is a, c, g, or t
tntatgaagggtgattatttagnagagttttaaaagaaattaancagaacatttaaaagtgtgtntctttgttgtttgtttttaant

SEQ ID NO: 1002 - DNA, 87 bp, Artificial Sequence
  Synthetic Probe
  modified_base (2)..(2): DNP phosphoramidite base
  misc_feature (2)..(2): n is a, c, g, or t
  modified_base (23)..(23): DNP phosphoramidite base
  misc_feature (23)..(23): n is a, c, g, or t
  modified_base (44)..(44): DNP phosphoramidite base
  misc_feature (44)..(44): n is a, c, g, or t
  modified_base (65)..(65): DNP phosphoramidite base
  misc_feature (65)..(65): n is a, c, g, or t
  modified_base (86)..(86): DNP phosphoramidite base
  misc_feature (86)..(86): n is a, c, g, or t
tncaaagttttctagtttttaantatcttgtctggagagtgtantccactacttgaaaaatactngcagttgaattattgatattnt

SEQ ID NO: 1003 - DNA, 87 bp, Artificial Sequence
  Synthetic Probe
  modified_base (2)..(2): DNP phosphoramidite base
  misc_feature (2)..(2): n is a, c, g, or t
  modified_base (23)..(23): DNP phosphoramidite base
  misc_feature (23)..(23): n is a, c, g, or t
  modified_base (44)..(44): DNP phosphoramidite base
  misc_feature (44)..(44): n is a, c, g, or t
  modified_base (65)..(65): DNP phosphoramidite base
  misc_feature (65)..(65): n is a, c, g, or t
  modified_base (86)..(86): DNP phosphoramidite base
  misc_feature (86)..(86): n is a, c, g, or t
tnaaattggaatcatattcagcnaaatgtaatttctggtgggtnaattttcttttttctttttanaggctattcaccatgctcttnt

SEQ ID NO: 1004 - DNA, 87 bp, Artificial Sequence
  Synthetic Probe
  modified_base (2)..(2): DNP phosphoramidite base
  misc_feature (2)..(2): n is a, c, g, or t
  modified_base (23)..(23): DNP phosphoramidite base
  misc_feature (23)..(23): n is a, c, g, or t
  modified_base (44)..(44): DNP phosphoramidite base
  misc_feature (44)..(44): n is a, c, g, or t
  modified_base (65)..(65): DNP phosphoramidite base
  misc_feature (65)..(65): n is a, c, g, or t
  modified_base (86)..(86): DNP phosphoramidite base
  misc_feature (86)..(86): n is a, c, g, or t
tnttatttcctcactctgcatantccactcctactcacctagangcttcaggttgagaaacttangtaacttccttattgtgtgtnt

SEQ ID NO: 1005 - DNA, 87 bp, Artificial Sequence
  Synthetic Probe
  modified_base (2)..(2): DNP phosphoramidite base
  misc_feature (2)..(2): n is a, c, g, or t
  modified_base (23)..(23): DNP phosphoramidite base
  misc_feature (23)..(23): n is a, c, g, or t
  modified_base (44)..(44): DNP phosphoramidite base
  misc_feature (44)..(44): n is a, c, g, or t
  modified_base (65)..(65): DNP phosphoramidite base
  misc_feature (65)..(65): n is a, c, g, or t
  modified_base (86)..(86): DNP phosphoramidite base
  misc_feature (86)..(86): n is a, c, g, or t
tnagggaaattgagtagaaattngcaaccaagattttggctaantagatttcacttattttagtngaaatatcattcaaaagtcgnt

SEQ ID NO: 1006 - DNA, 87 bp, Artificial Sequence
  Synthetic Probe
  modified_base (2)..(2): DNP phosphoramidite base
  misc_feature (2)..(2): n is a, c, g, or t
  modified_base (23)..(23): DNP phosphoramidite base
  misc_feature (23)..(23): n is a, c, g, or t
  modified_base (44)..(44): DNP phosphoramidite base
  misc_feature (44)..(44): n is a, c, g, or t
  modified_base (65)..(65): DNP phosphoramidite base
  misc_feature (65)..(65): n is a, c, g, or t
  modified_base (86)..(86): DNP phosphoramidite base
  misc_feature (86)..(86): n is a, c, g, or t
tnaattacctaaaaacattttgnccagcataatttatttcattnggggagttgatgaatgtcacntggtgtgtcatcagtttgcant

SEQ ID NO: 1007 - DNA, 87 bp, Artificial Sequence
  Synthetic Probe
  modified_base (2)..(2): DNP phosphoramidite base
  misc_feature (2)..(2): n is a, c, g, or t
  modified_base (23)..(23): DNP phosphoramidite base
  misc_feature (23)..(23): n is a, c, g, or t
  modified_base (44)..(44): DNP phosphoramidite base
  misc_feature (44)..(44): n is a, c, g, or t
  modified_base (65)..(65): DNP phosphoramidite base
  misc_feature (65)..(65): n is a, c, g, or t
  modified_base (86)..(86): DNP phosphoramidite base
  misc_feature (86)..(86): n is a, c, g, or t
tngttattgaacacatgtatagnggcattatactgtatactatngagaagtaccataatgaatanaaacccctttctaacctccant

SEQ ID NO: 1008 - DNA, 87 bp, Artificial Sequence
  Synthetic Probe
  modified_base (2)..(2): DNP phosphoramidite base
  misc_feature (2)..(2): n is a, c, g, or t
  modified_base (23)..(23): DNP phosphoramidite base
  misc_feature (23)..(23): n is a, c, g, or t
  modified_base (44)..(44): DNP phosphoramidite base
  misc_feature (44)..(44): n is a, c, g, or t
  modified_base (65)..(65): DNP phosphoramidite base
  misc_feature (65)..(65): n is a, c, g, or t
  modified_base (86)..(86): DNP phosphoramidite base
  misc_feature (86)..(86): n is a, c, g, or t
tnacatacaatcttaggtattcncattatataactaacttaatnattcatttatatcacttttcntaatgccatttcaattttgcnt

SEQ ID NO: 1009 - DNA, 87 bp, Artificial Sequence
  Synthetic Probe
  modified_base (2)..(2): DNP phosphoramidite base
  misc_feature (2)..(2): n is a, c, g, or t
  modified_base (23)..(23): DNP phosphoramidite base
  misc_feature (23)..(23): n is a, c, g, or t
  modified_base (44)..(44): DNP phosphoramidite base
  misc_feature (44)..(44): n is a, c, g, or t
  modified_base (65)..(65): DNP phosphoramidite base
  misc_feature (65)..(65): n is a, c, g, or t
  modified_base (86)..(86): DNP phosphoramidite base
  misc_feature (86)..(86): n is a, c, g, or t
tntgggatttgtcttcttgcacntttattttttctgaaatgtancattgctagtatttgtgtaangccaagtggttaatcttttcnt

SEQ ID NO: 1010 - DNA, 87 bp, Artificial Sequence
  Synthetic Probe
  modified_base (2)..(2): DNP phosphoramidite base
  misc_feature (2)..(2): n is a, c, g, or t
  modified_base (23)..(23): DNP phosphoramidite base
  misc_feature (23)..(23): n is a, c, g, or t
  modified_base (44)..(44): DNP phosphoramidite base
  misc_feature (44)..(44): n is a, c, g, or t
  modified_base (65)..(65): DNP phosphoramidite base
  misc_feature (65)..(65): n is a, c, g, or t
  modified_base (86)..(86): DNP phosphoramidite base
  misc_feature (86)..(86): n is a, c, g, or t
tnagaactactttttttactgtntatgttttgtttttcatgatntttgtatattcttcaggacanagcagtgggaagagctctgtnt

SEQ ID NO: 1011 - DNA, 87 bp, Artificial Sequence
  Synthetic Probe
  modified_base (2)..(2): DNP phosphoramidite base
  misc_feature (2)..(2): n is a, c, g, or t
  modified_base (23)..(23): DNP phosphoramidite base
  misc_feature (23)..(23): n is a, c, g, or t
  modified_base (44)..(44): DNP phosphoramidite base
  misc_feature (44)..(44): n is a, c, g, or t
  modified_base (65)..(65): DNP phosphoramidite base
  misc_feature (65)..(65): n is a, c, g, or t
  modified_base (86)..(86): DNP phosphoramidite base
  misc_feature (86)..(86): n is a, c, g, or t
tnttaactttatcagatgagggnccaatggcaattccctacctnttcataaatttctcaattcangtgccactccttcagccaaant

SEQ ID NO: 1012 - DNA, 87 bp, Artificial Sequence
  Synthetic Probe
  modified_base (2)..(2): DNP phosphoramidite base
  misc_feature (2)..(2): n is a, c, g, or t
  modified_base (23)..(23): DNP phosphoramidite base
  misc_feature (23)..(23): n is a, c, g, or t
  modified_base (44)..(44): DNP phosphoramidite base
  misc_feature (44)..(44): n is a, c, g, or t
  modified_base (65)..(65): DNP phosphoramidite base
  misc_feature (65)..(65): n is a, c, g, or t
  modified_base (86)..(86): DNP phosphoramidite base
  misc_feature (86)..(86): n is a, c, g, or t
tnattcaggttctcaagattgcntcagaaggttttatttcagangttttaccttttatatacctngttttgctaaaataaatgtant

SEQ ID NO: 1013 - DNA, 87 bp, Artificial Sequence
  Synthetic Probe
  modified_base (2)..(2): DNP phosphoramidite base
  misc_feature (2)..(2): n is a, c, g, or t
  modified_base (23)..(23): DNP phosphoramidite base
  misc_feature (23)..(23): n is a, c, g, or t
  modified_base (44)..(44): DNP phosphoramidite base
  misc_feature (44)..(44): n is a, c, g, or t
  modified_base (65)..(65): DNP phosphoramidite base
  misc_feature (65)..(65): n is a, c, g, or t
  modified_base (86)..(86): DNP phosphoramidite base
  misc_feature (86)..(86): n is a, c, g, or t
tntttttattgaattttattacnaagtggagtttatttttttcnttttcctcctgctttagacangttaatcaactggcccatgcnt

SEQ ID NO: 1014 - DNA, 87 bp, Artificial Sequence
  Synthetic Probe
  modified_base (2)..(2): DNP phosphoramidite base
  misc_feature (2)..(2): n is a, c, g, or t
  modified_base (23)..(23): DNP phosphoramidite base
  misc_feature (23)..(23): n is a, c, g, or t
  modified_base (44)..(44): DNP phosphoramidite base
  misc_feature (44)..(44): n is a, c, g, or t
  modified_base (65)..(65): DNP phosphoramidite base
  misc_feature (65)..(65): n is a, c, g, or t
  modified_base (86)..(86): DNP phosphoramidite base
  misc_feature (86)..(86): n is a, c, g, or t
tnctggtgttagtagacaggtanaaattacatgtggattgcatntttctctggaagtttatttanatagtataatactgcttactnt

SEQ ID NO: 1015 - DNA, 87 bp, Artificial Sequence
  Synthetic Probe
  modified_base (2)..(2): DNP phosphoramidite base
  misc_feature (2)..(2): n is a, c, g, or t
  modified_base (23)..(23): DNP phosphoramidite base
  misc_feature (23)..(23): n is a, c, g, or t
  modified_base (44)..(44): DNP phosphoramidite base
  misc_feature (44)..(44): n is a, c, g, or t
  modified_base (65)..(65): DNP phosphoramidite base
  misc_feature (65)..(65): n is a, c, g, or t
  modified_base (86)..(86): DNP phosphoramidite base
  misc_feature (86)..(86): n is a, c, g, or t
tntctcattagctagattaaggnaagagatatggtattggtttntattttataagttacataaanagcaccaattcatcactctgnt

SEQ ID NO: 1016 - DNA, 87 bp, Artificial Sequence
  Synthetic Probe
  modified_base (2)..(2): DNP phosphoramidite base
  misc_feature (2)..(2): n is a, c, g, or t
  modified_base (23)..(23): DNP phosphoramidite base
  misc_feature (23)..(23): n is a, c, g, or t
  modified_base (44)..(44): DNP phosphoramidite base
  misc_feature (44)..(44): n is a, c, g, or t
  modified_base (65)..(65): DNP phosphoramidite base
  misc_feature (65)..(65): n is a, c, g, or t
  modified_base (86)..(86): DNP phosphoramidite base
  misc_feature (86)..(86): n is a, c, g, or t
tnaagcataaacattaaaaaganttgaaatattgagcatgttantttgctttgtcaaagatcacntaagttaaaatttcctagacnt

SEQ ID NO: 1017 - DNA, 87 bp, Artificial Sequence
  Synthetic Probe
  modified_base (2)..(2): DNP phosphoramidite base
  misc_feature (2)..(2): n is a, c, g, or t
  modified_base (23)..(23): DNP phosphoramidite base
  misc_feature (23)..(23): n is a, c, g, or t
  modified_base (44)..(44): DNP phosphoramidite base
  misc_feature (44)..(44): n is a, c, g, or t
  modified_base (65)..(65): DNP phosphoramidite base
  misc_feature (65)..(65): n is a, c, g, or t
  modified_base (86)..(86): DNP phosphoramidite base
  misc_feature (86)..(86): n is a, c, g, or t
tnattctgtaacccaaattttcntttttaagaaatataatacanatttttatttcactctcattnagtccaggcacagatgtcacnt

SEQ ID NO: 1018 - DNA, 87 bp, Artificial Sequence
  Synthetic Probe
  modified_base (2)..(2): DNP phosphoramidite base
  misc_feature (2)..(2): n is a, c, g, or t
  modified_base (23)..(23): DNP phosphoramidite base
  misc_feature (23)..(23): n is a, c, g, or t
  modified_base (44)..(44): DNP phosphoramidite base
  misc_feature (44)..(44): n is a, c, g, or t
  modified_base (65)..(65): DNP phosphoramidite base
  misc_feature (65)..(65): n is a, c, g, or t
  modified_base (86)..(86): DNP phosphoramidite base
  misc_feature (86)..(86): n is a, c, g, or t
tnttttaattctgaaaagcaagnggaaatccatatcgtggattnagaaaaaacttctaaaaacanggcatgaatgaaggggtttgnt

SEQ ID NO: 1019 - DNA, 87 bp, Artificial Sequence
  Synthetic Probe
  modified_base (2)..(2): DNP phosphoramidite base
  misc_feature (2)..(2): n is a, c, g, or t
  modified_base (23)..(23): DNP phosphoramidite base
  misc_feature (23)..(23): n is a, c, g, or t
  modified_base (44)..(44): DNP phosphoramidite base
  misc_feature (44)..(44): n is a, c, g, or t
  modified_base (65)..(65): DNP phosphoramidite base
  misc_feature (65)..(65): n is a, c, g, or t
  modified_base (86)..(86): DNP phosphoramidite base
  misc_feature (86)..(86): n is a, c, g, or t
tnagtgccagaaattttaggatngcttatttaagtctcttgaantaaagtataaaccactccttnccttctgccatctatcaggcnt

SEQ ID NO: 1020 - DNA, 87 bp, Artificial Sequence
  Synthetic Probe
  modified_base (2)..(2): DNP phosphoramidite base
  misc_feature (2)..(2): n is a, c, g, or t
  modified_base (23)..(23): DNP phosphoramidite base
  misc_feature (23)..(23): n is a, c, g, or t
  modified_base (44)..(44): DNP phosphoramidite base
  misc_feature (44)..(44): n is a, c, g, or t
  modified_base (65)..(65): DNP phosphoramidite base
  misc_feature (65)..(65): n is a, c, g, or t
  modified_base (86)..(86): DNP phosphoramidite base
  misc_feature (86)..(86): n is a, c, g, or t
tnaaatctttgaggtaggaattnttgtgattgtattgcctaatnacaaaactctttctttggttnggagaaagcataatcttctant

SEQ ID NO: 1021 - DNA, 87 bp, Artificial Sequence
  Synthetic Probe
  modified_base (2)..(2): DNP phosphoramidite base
  misc_feature (2)..(2): n is a, c, g, or t
  modified_base (23)..(23): DNP phosphoramidite base
  misc_feature (23)..(23): n is a, c, g, or t
  modified_base (44)..(44): DNP phosphoramidite base
  misc_feature (44)..(44): n is a, c, g, or t
  modified_base (65)..(65): DNP phosphoramidite base
  misc_feature (65)..(65): n is a, c, g, or t
  modified_base (86)..(86): DNP phosphoramidite base
  misc_feature (86)..(86): n is a, c, g, or t
tntttgtcaataacttttgctgnttatttagtttagttactgancacagccagtaaaatgtgganaagtgaagaaaaggagccccnt

SEQ ID NO: 1022 - DNA, 87 bp, Artificial Sequence
  Synthetic Probe
  modified_base (2)..(2): DNP phosphoramidite base
  misc_feature (2)..(2): n is a, c, g, or t
  modified_base (23)..(23): DNP phosphoramidite base
  misc_feature (23)..(23): n is a, c, g, or t
  modified_base (44)..(44): DNP phosphoramidite base
  misc_feature (44)..(44): n is a, c, g, or t
  modified_base (65)..(65): DNP phosphoramidite base
  misc_feature (65)..(65): n is a, c, g, or t
  modified_base (86)..(86): DNP phosphoramidite base
  misc_feature (86)..(86): n is a, c, g, or t
tnttgagaattaaagattgtaantttattccttattcttatttnttatgtattttatataaatanagaaactgtgtttcaatattnt

SEQ ID NO: 1023 - DNA, 87 bp, Artificial Sequence
  Synthetic Probe
  modified_base (2)..(2): DNP phosphoramidite base
  misc_feature (2)..(2): n is a, c, g, or t
  modified_base (23)..(23): DNP phosphoramidite base
  misc_feature (23)..(23): n is a, c, g, or t
  modified_base (44)..(44): DNP phosphoramidite base
  misc_feature (44)..(44): n is a, c, g, or t
  modified_base (65)..(65): DNP phosphoramidite base
  misc_feature (65)..(65): n is a, c, g, or t
  modified_base (86)..(86): DNP phosphoramidite base
  misc_feature (86)..(86): n is a, c, g, or t
tngaatgaaattccctgtattcnaataatttggaacaagagtanaacaagcgtaattgctgttgngaatggataatagagcaaagnt

SEQ ID NO: 1024 - DNA, 87 bp, Artificial Sequence
  Synthetic Probe
  modified_base (2)..(2): DNP phosphoramidite base
  misc_feature (2)..(2): n is a, c, g, or t
  modified_base (23)..(23): DNP phosphoramidite base
  misc_feature (23)..(23): n is a, c, g, or t
  modified_base (44)..(44): DNP phosphoramidite base
  misc_feature (44)..(44): n is a, c, g, or t
  modified_base (65)..(65): DNP phosphoramidite base
  misc_feature (65)..(65): n is a, c, g, or t
  modified_base (86)..(86): DNP phosphoramidite base
  misc_feature (86)..(86): n is a, c, g, or t
tntaagcattatccttttttacntttgtgccgcatgactaatangaagtatacaaaacatgattnaatgccatttgacaaaatttnt

SEQ ID NO: 1025 - DNA, 87 bp, Artificial Sequence
  Synthetic Probe
  modified_base (2)..(2): DNP phosphoramidite base
  misc_feature (2)..(2): n is a, c, g, or t
  modified_base (23)..(23): DNP phosphoramidite base
  misc_feature (23)..(23): n is a, c, g, or t
  modified_base (44)..(44): DNP phosphoramidite base
  misc_feature (44)..(44): n is a, c, g, or t
  modified_base (65)..(65): DNP phosphoramidite base
  misc_feature (65)..(65): n is a, c, g, or t
  modified_base (86)..(86): DNP phosphoramidite base
  misc_feature (86)..(86): n is a, c, g, or t
tntattatatttatatactgtgnttaccacatgtccattctccnatattttgtgccaaacattcntaaatgaataattgagtagant

SEQ ID NO: 1026 - DNA, 87 bp, Artificial Sequence
  Synthetic Probe
  modified_base (2)..(2): DNP phosphoramidite base
  misc_feature (2)..(2): n is a, c, g, or t
  modified_base (23)..(23): DNP phosphoramidite base
  misc_feature (23)..(23): n is a, c, g, or t
  modified_base (44)..(44): DNP phosphoramidite base
  misc_feature (44)..(44): n is a, c, g, or t
  modified_base (65)..(65): DNP phosphoramidite base
  misc_feature (65)..(65): n is a, c, g, or t
  modified_base (86)..(86): DNP phosphoramidite base
  misc_feature (86)..(86): n is a, c, g, or t
tnaaagagcttcagcgttttcangaaacttctaggaaactattngaagtgcctgagtggtagatnggggagggaggctagtttctnt

SEQ ID NO: 1027 - DNA, 87 bp, Artificial Sequence
  Synthetic Probe
  modified_base (2)..(2): DNP phosphoramidite base
  misc_feature (2)..(2): n is a, c, g, or t
  modified_base (23)..(23): DNP phosphoramidite base
  misc_feature (23)..(23): n is a, c, g, or t
  modified_base (44)..(44): DNP phosphoramidite base
  misc_feature (44)..(44): n is a, c, g, or t
  modified_base (65)..(65): DNP phosphoramidite base
  misc_feature (65)..(65): n is a, c, g, or t
  modified_base (86)..(86): DNP phosphoramidite base
  misc_feature (86)..(86): n is a, c, g, or t
tntttattcagagacattaaaanctcaccctacatttgactganatagttctttagatattaacncttctgaacccctattttgcnt

SEQ ID NO: 1028 - DNA, 87 bp, Artificial Sequence
  Synthetic Probe
  modified_base (2)..(2): DNP phosphoramidite base
  misc_feature (2)..(2): n is a, c, g, or t
  modified_base (23)..(23): DNP phosphoramidite base
  misc_feature (23)..(23): n is a, c, g, or t
  modified_base (44)..(44): DNP phosphoramidite base
  misc_feature (44)..(44): n is a, c, g, or t
  modified_base (65)..(65): DNP phosphoramidite base
  misc_feature (65)..(65): n is a, c, g, or t
  modified_base (86)..(86): DNP phosphoramidite base
  misc_feature (86)..(86): n is a, c, g, or t
tntaaaaaatgtgcttactatcntctcatctttaatttggtgangagaaaaaaggttattagacnagatgaagacaaactggaagnt

SEQ ID NO: 1029 - DNA, 87 bp, Artificial Sequence
  Synthetic Probe
  modified_base (2)..(2): DNP phosphoramidite base
  misc_feature (2)..(2): n is a, c, g, or t
  modified_base (23)..(23): DNP phosphoramidite base
  misc_feature (23)..(23): n is a, c, g, or t
  modified_base (44)..(44): DNP phosphoramidite base
  misc_feature (44)..(44): n is a, c, g, or t
  modified_base (65)..(65): DNP phosphoramidite base
  misc_feature (65)..(65): n is a, c, g, or t
  modified_base (86)..(86): DNP phosphoramidite base
  misc_feature (86)..(86): n is a, c, g, or t
tncctgaaaatgttgcgatgganattacagtaatgtgttacggncttgggcccctcgcaggagtngtatctcgcagtcagcagtgnt

SEQ ID NO: 1030 - DNA, 87 bp, Artificial Sequence
  Synthetic Probe
  modified_base (2)..(2): DNP phosphoramidite base
  misc_feature (2)..(2): n is a, c, g, or t
  modified_base (23)..(23): DNP phosphoramidite base
  misc_feature (23)..(23): n is a, c, g, or t
  modified_base (44)..(44): DNP phosphoramidite base
  misc_feature (44)..(44): n is a, c, g, or t
  modified_base (65)..(65): DNP phosphoramidite base
  misc_feature (65)..(65): n is a, c, g, or t
  modified_base (86)..(86): DNP phosphoramidite base
  misc_feature (86)..(86): n is a, c, g, or t
tnaaaacataatggattcagtanaacctggcagctgaagataanaaggtatgagttcattttgtntgcaacataaaaatgttagtnt

SEQ ID NO: 1031 - DNA, 87 bp, Artificial Sequence
  Synthetic Probe
  modified_base (2)..(2): DNP phosphoramidite base
  misc_feature (2)..(2): n is a, c, g, or t
  modified_base (23)..(23): DNP phosphoramidite base
  misc_feature (23)..(23): n is a, c, g, or t
  modified_base (44)..(44): DNP phosphoramidite base
  misc_feature (44)..(44): n is a, c, g, or t
  modified_base (65)..(65): DNP phosphoramidite base
  misc_feature (65)..(65): n is a, c, g, or t
  modified_base (86)..(86): DNP phosphoramidite base
  misc_feature (86)..(86): n is a, c, g, or t
tnaagatgaggttttaaattgtntgtactataaatactttttancactgaaatcaaccttgtggngtttaactgatgcctacttcnt

SEQ ID NO: 1032 - DNA, 87 bp, Artificial Sequence
  Synthetic Probe
  modified_base (2)..(2): DNP phosphoramidite base
  misc_feature (2)..(2): n is a, c, g, or t
  modified_base (23)..(23): DNP phosphoramidite base
  misc_feature (23)..(23): n is a, c, g, or t
  modified_base (44)..(44): DNP phosphoramidite base
  misc_feature (44)..(44): n is a, c, g, or t
  modified_base (65)..(65): DNP phosphoramidite base
  misc_feature (65)..(65): n is a, c, g, or t
  modified_base (86)..(86): DNP phosphoramidite base
  misc_feature (86)..(86): n is a, c, g, or t
tntatatttttaagtgcgtattntgaaagtgtcgatatttattnctgcaaccttgcacacatcantttatatcccctggacctcant

SEQ ID NO: 1033 - DNA, 87 bp, Artificial Sequence
  Synthetic Probe
  modified_base (2)..(2): DNP phosphoramidite base
  misc_feature (2)..(2): n is a, c, g, or t
  modified_base (23)..(23): DNP phosphoramidite base
  misc_feature (23)..(23): n is a, c, g, or t
  modified_base (44)..(44): DNP phosphoramidite base
  misc_feature (44)..(44): n is a, c, g, or t
  modified_base (65)..(65): DNP phosphoramidite base
  misc_feature (65)..(65): n is a, c, g, or t
  modified_base (86)..(86): DNP phosphoramidite base
  misc_feature (86)..(86): n is a, c, g, or t
tngcagtggaagaaccatttctntcaagcagatttttatgaagnaagtccaaaacaggtgatccntctttctgcattcaacccacnt

SEQ ID NO: 1034 - DNA, 87 bp, Artificial Sequence
  Synthetic Probe
  modified_base (2)..(2): DNP phosphoramidite base
  misc_feature (2)..(2): n is a, c, g, or t
  modified_base (23)..(23): DNP phosphoramidite base
  misc_feature (23)..(23): n is a, c, g, or t
  modified_base (44)..(44): DNP phosphoramidite base
  misc_feature (44)..(44): n is a, c, g, or t
  modified_base (65)..(65): DNP phosphoramidite base
  misc_feature (65)..(65): n is a, c, g, or t
  modified_base (86)..(86): DNP phosphoramidite base
  misc_feature (86)..(86): n is a, c, g, or t
tnagagaaacgtggtttctatcnaaatcatctatataaaatacntttataagtgaaatattactntgaatcctttgagatgttacnt

SEQ ID NO: 1035 - DNA, 87 bp, Artificial Sequence
  Synthetic Probe
  modified_base (2)..(2): DNP phosphoramidite base
  misc_feature (2)..(2): n is a, c, g, or t
  modified_base (23)..(23): DNP phosphoramidite base
  misc_feature (23)..(23): n is a, c, g, or t
  modified_base (44)..(44): DNP phosphoramidite base
  misc_feature (44)..(44): n is a, c, g, or t
  modified_base (65)..(65): DNP phosphoramidite base
  misc_feature (65)..(65): n is a, c, g, or t
  modified_base (86)..(86): DNP phosphoramidite base
  misc_feature (86)..(86): n is a, c, g, or t
tnatttaatttttttgaataatntgataatcttgtttaattatntttaactccaaaattttcatnattttcaggtttcatgtgcant

SEQ ID NO: 1036 - DNA, 87 bp, Artificial Sequence
  Synthetic Probe
  modified_base (2)..(2): DNP phosphoramidite base
  misc_feature (2)..(2): n is a, c, g, or t
  modified_base (23)..(23): DNP phosphoramidite base
  misc_feature (23)..(23): n is a, c, g, or t
  modified_base (44)..(44): DNP phosphoramidite base
  misc_feature (44)..(44): n is a, c, g, or t
  modified_base (65)..(65): DNP phosphoramidite base
  misc_feature (65)..(65): n is a, c, g, or t
  modified_base (86)..(86): DNP phosphoramidite base
  misc_feature (86)..(86): n is a, c, g, or t
tnagttaaagtatagataaaatntattcagagacagtttcttanttattctataccctcatttantttcatggtttggcatttcant

SEQ ID NO: 1037 - DNA, 87 bp, Artificial Sequence
  Synthetic Probe
  modified_base (2)..(2): DNP phosphoramidite base
  misc_feature (2)..(2): n is a, c, g, or t
  modified_base (23)..(23): DNP phosphoramidite base
  misc_feature (23)..(23): n is a, c, g, or t
  modified_base (44)..(44): DNP phosphoramidite base
  misc_feature (44)..(44): n is a, c, g, or t
  modified_base (65)..(65): DNP phosphoramidite base
  misc_feature (65)..(65): n is a, c, g, or t
  modified_base (86)..(86): DNP phosphoramidite base
  misc_feature (86)..(86): n is a, c, g, or t
tntccattgaaggtaaaacattntaccattcttatcttaagtgnttgtaattttgttctttctangaaaatttgaagccattactnt

SEQ ID NO: 1038 - DNA, 87 bp, Artificial Sequence
  Synthetic Probe
  modified_base (2)..(2): DNP phosphoramidite base
  misc_feature (2)..(2): n is a, c, g, or t
  modified_base (23)..(23): DNP phosphoramidite base
  misc_feature (23)..(23): n is a, c, g, or t
  modified_base (44)..(44): DNP phosphoramidite base
  misc_feature (44)..(44): n is a, c, g, or t
  modified_base (65)..(65): DNP phosphoramidite base
  misc_feature (65)..(65): n is a, c, g, or t
  modified_base (86)..(86): DNP phosphoramidite base
  misc_feature (86)..(86): n is a, c, g, or t
tnattaaaatcgaaatgtttgcnaaggctgcctgttagctcacnaaaagaaaaggtatacagtantttacttctatttataggatnt

SEQ ID NO: 1039 - DNA, 87 bp, Artificial Sequence
  Synthetic Probe
  modified_base (2)..(2): DNP phosphoramidite base
  misc_feature (2)..(2): n is a, c, g, or t
  modified_base (23)..(23): DNP phosphoramidite base
  misc_feature (23)..(23): n is a, c, g, or t
  modified_base (44)..(44): DNP phosphoramidite base
  misc_feature (44)..(44): n is a, c, g, or t
  modified_base (65)..(65): DNP phosphoramidite base
  misc_feature (65)..(65): n is a, c, g, or t
  modified_base (86)..(86): DNP phosphoramidite base
  misc_feature (86)..(86): n is a, c, g, or t
tnctgtaaaatagtatgaaaatnttgcaggttaaaagtagtganattaaatatcacaagtttcantcttaaatttttaaaaaacant

SEQ ID NO: 1040 - DNA, 87 bp, Artificial Sequence
  Synthetic Probe
  modified_base (2)..(2): DNP phosphoramidite base
  misc_feature (2)..(2): n is a, c, g, or t
  modified_base (23)..(23): DNP phosphoramidite base
  misc_feature (23)..(23): n is a, c, g, or t
  modified_base (44)..(44): DNP phosphoramidite base
  misc_feature (44)..(44): n is a, c, g, or t
  modified_base (65)..(65): DNP phosphoramidite base
  misc_feature (65)..(65): n is a, c, g, or t
  modified_base (86)..(86): DNP phosphoramidite base
  misc_feature (86)..(86): n is a, c, g, or t
tnctttaggaatgaactatcacncacctagctggtctttaatancttcctaagcattttcacatncacagcacacaaagaaatatnt

SEQ ID NO: 1041 - DNA, 87 bp, Artificial Sequence
  Synthetic Probe
  modified_base (2)..(2): DNP phosphoramidite base
  misc_feature (2)..(2): n is a, c, g, or t
  modified_base (23)..(23): DNP phosphoramidite base
  misc_feature (23)..(23): n is a, c, g, or t
  modified_base (44)..(44): DNP phosphoramidite base
  misc_feature (44)..(44): n is a, c, g, or t
  modified_base (65)..(65): DNP phosphoramidite base
  misc_feature (65)..(65): n is a, c, g, or t
  modified_base (86)..(86): DNP phosphoramidite base
  misc_feature (86)..(86): n is a, c, g, or t
tnttgtacgttgaggtaataagnaaaaccccaggtgccctatcntagccttctctgaatatcaanggggatctgtcttaagtattnt

SEQ ID NO: 1042 - DNA, 87 bp, Artificial Sequence
  Synthetic Probe
  modified_base (2)..(2): DNP phosphoramidite base
  misc_feature (2)..(2): n is a, c, g, or t
  modified_base (23)..(23): DNP phosphoramidite base
  misc_feature (23)..(23): n is a, c, g, or t
  modified_base (44)..(44): DNP phosphoramidite base
  misc_feature (44)..(44): n is a, c, g, or t
  modified_base (65)..(65): DNP phosphoramidite base
  misc_feature (65)..(65): n is a, c, g, or t
  modified_base (86)..(86): DNP phosphoramidite base
  misc_feature (86)..(86): n is a, c, g, or t
tnatatgcttgttttggtttttngaaaggtctgacctacaatantttaacattgttttatttttngagatacattgaatcaggatnt

SEQ ID NO: 1043 - DNA, 87 bp, Artificial Sequence
  Synthetic Probe
  modified_base (2)..(2): DNP phosphoramidite base
  misc_feature (2)..(2): n is a, c, g, or t
  modified_base (23)..(23): DNP phosphoramidite base
  misc_feature (23)..(23): n is a, c, g, or t
  modified_base (44)..(44): DNP phosphoramidite base
  misc_feature (44)..(44): n is a, c, g, or t
  modified_base (65)..(65): DNP phosphoramidite base
  misc_feature (65)..(65): n is a, c, g, or t
  modified_base (86)..(86): DNP phosphoramidite base
  misc_feature (86)..(86): n is a, c, g, or t
tnatacatttttagaaaatgtantctaactcaaagatccatagnggaactaaaatgcttttaaantgtactctccaaagtggtgtnt

SEQ ID NO: 1044 - DNA, 87 bp, Artificial Sequence
  Synthetic Probe
  modified_base (2)..(2): DNP phosphoramidite base
  misc_feature (2)..(2): n is a, c, g, or t
  modified_base (23)..(23): DNP phosphoramidite base
  misc_feature (23)..(23): n is a, c, g, or t
  modified_base (44)..(44): DNP phosphoramidite base
  misc_feature (44)..(44): n is a, c, g, or t
  modified_base (65)..(65): DNP phosphoramidite base
  misc_feature (65)..(65): n is a, c, g, or t
  modified_base (86)..(86): DNP phosphoramidite base
  misc_feature (86)..(86): n is a, c, g, or t
tntaaagcttattcatttttganagacatttatgactgcttctnaaatttttattttaagacaanatagctaccacttttgctcgnt

SEQ ID NO: 1045 - DNA, 87 bp, Artificial Sequence
  Synthetic Probe
  modified_base (2)..(2): DNP phosphoramidite base
  misc_feature (2)..(2): n is a, c, g, or t
  modified_base (23)..(23): DNP phosphoramidite base
  misc_feature (23)..(23): n is a, c, g, or t
  modified_base (44)..(44): DNP phosphoramidite base
  misc_feature (44)..(44): n is a, c, g, or t
  modified_base (65)..(65): DNP phosphoramidite base
  misc_feature (65)..(65): n is a, c, g, or t
  modified_base (86)..(86): DNP phosphoramidite base
  misc_feature (86)..(86): n is a, c, g, or t
tncctttcttctcaataatttgnaacatttactggtctcattancaaaatatgtaaaattattanatgaatttgtattcattcctnt

SEQ ID NO: 1046 - DNA, 87 bp, Artificial Sequence
  Synthetic Probe
  modified_base (2)..(2): DNP phosphoramidite base
  misc_feature (2)..(2): n is a, c, g, or t
  modified_base (23)..(23): DNP phosphoramidite base
  misc_feature (23)..(23): n is a, c, g, or t
  modified_base (44)..(44): DNP phosphoramidite base
  misc_feature (44)..(44): n is a, c, g, or t
  modified_base (65)..(65): DNP phosphoramidite base
  misc_feature (65)..(65): n is a, c, g, or t
  modified_base (86)..(86): DNP phosphoramidite base
  misc_feature (86)..(86): n is a, c, g, or t
tntaaatgaaaatcttccatatnttaattccatgtggtttgcangtttcaccgaaggtttaaatngaaaatcttccatatttaatnt

SEQ ID NO: 1047 - DNA, 87 bp, Artificial Sequence
  Synthetic Probe
  modified_base (2)..(2): DNP phosphoramidite base
  misc_feature (2)..(2): n is a, c, g, or t
  modified_base (23)..(23): DNP phosphoramidite base
  misc_feature (23)..(23): n is a, c, g, or t
  modified_base (44)..(44): DNP phosphoramidite base
  misc_feature (44)..(44): n is a, c, g, or t
  modified_base (65)..(65): DNP phosphoramidite base
  misc_feature (65)..(65): n is a, c, g, or t
  modified_base (86)..(86): DNP phosphoramidite base
  misc_feature (86)..(86): n is a, c, g, or t
tntccatgtggtttgcagtttcnactgaaggctaattgcaacanagaaaacaaatctgaattganaagggactttatagatcgaant

SEQ ID NO: 1048 - DNA, 87 bp, Artificial Sequence
  Synthetic Probe
  modified_base (2)..(2): DNP phosphoramidite base
  misc_feature (2)..(2): n is a, c, g, or t
  modified_base (23)..(23): DNP phosphoramidite base
  misc_feature (23)..(23): n is a, c, g, or t
  modified_base (44)..(44): DNP phosphoramidite base
  misc_feature (44)..(44): n is a, c, g, or t
  modified_base (65)..(65): DNP phosphoramidite base
  misc_feature (65)..(65): n is a, c, g, or t
  modified_base (86)..(86): DNP phosphoramidite base
  misc_feature (86)..(86): n is a, c, g, or t
tnttgttatagtcacttataagntatctgggtctaagtaatttnccttagatgtttctaaagaanacattttcagctttgctcccnt

SEQ ID NO: 1049 - DNA, 87 bp, Artificial Sequence
  Synthetic Probe
  modified_base (2)..(2): DNP phosphoramidite base
  misc_feature (2)..(2): n is a, c, g, or t
  modified_base (23)..(23): DNP phosphoramidite base
  misc_feature (23)..(23): n is a, c, g, or t
  modified_base (44)..(44): DNP phosphoramidite base
  misc_feature (44)..(44): n is a, c, g, or t
  modified_base (65)..(65): DNP phosphoramidite base
  misc_feature (65)..(65): n is a, c, g, or t
  modified_base (86)..(86): DNP phosphoramidite base
  misc_feature (86)..(86): n is a, c, g, or t
tnaaatgcaagtgttcagatgcnttctttgaaaagaaaacaatnaggatagagcaccattgtgtnaaaagacaaaaggcttgagant

SEQ ID NO: 1050 - DNA, 87 bp, Artificial Sequence
  Synthetic Probe
  modified_base (2)..(2): DNP phosphoramidite base
  misc_feature (2)..(2): n is a, c, g, or t
  modified_base (23)..(23): DNP phosphoramidite base
  misc_feature (23)..(23): n is a, c, g, or t
  modified_base (44)..(44): DNP phosphoramidite base
  misc_feature (44)..(44): n is a, c, g, or t
  modified_base (65)..(65): DNP phosphoramidite base
  misc_feature (65)..(65): n is a, c, g, or t
  modified_base (86)..(86): DNP phosphoramidite base
  misc_feature (86)..(86): n is a, c, g, or t
tntatctaccaagtatatcactngaagttctattaattaagaanataaatactgtatgatgtaangattttgttgaatacatttant

SEQ ID NO: 1051 - DNA, 87 bp, Artificial Sequence
  Synthetic Probe
  modified_base (2)..(2): DNP phosphoramidite base
  misc_feature (2)..(2): n is a, c, g, or t
  modified_base (23)..(23): DNP phosphoramidite base
  misc_feature (23)..(23): n is a, c, g, or t
  modified_base (44)..(44): DNP phosphoramidite base
  misc_feature (44)..(44): n is a, c, g, or t
  modified_base (65)..(65): DNP phosphoramidite base
  misc_feature (65)..(65): n is a, c, g, or t
  modified_base (86)..(86): DNP phosphoramidite base
  misc_feature (86)..(86): n is a, c, g, or t
tnacaccagttggaatatagctnttttcccccccgtaatgctgnctttatcacaactgtattttnacaaaatcagcaactggattnt

SEQ ID NO: 1052 - DNA, 87 bp, Artificial Sequence
  Synthetic Probe
  modified_base (2)..(2): DNP phosphoramidite base
  misc_feature (2)..(2): n is a, c, g, or t
  modified_base (23)..(23): DNP phosphoramidite base
  misc_feature (23)..(23): n is a, c, g, or t
  modified_base (44)..(44): DNP phosphoramidite base
  misc_feature (44)..(44): n is a, c, g, or t
  modified_base (65)..(65): DNP phosphoramidite base
  misc_feature (65)..(65): n is a, c, g, or t
  modified_base (86)..(86): DNP phosphoramidite base
  misc_feature (86)..(86): n is a, c, g, or t
tnattttatcaacatgcaaacantttgctaaatacaaggtgtanccatcaatgtgtgattaattnaataagttactttttaaaatnt

SEQ ID NO: 1053 - DNA, 87 bp, Artificial Sequence
  Synthetic Probe
  modified_base (2)..(2): DNP phosphoramidite base
  misc_feature (2)..(2): n is a, c, g, or t
  modified_base (23)..(23): DNP phosphoramidite base
  misc_feature (23)..(23): n is a, c, g, or t
  modified_base (44)..(44): DNP phosphoramidite base
  misc_feature (44)..(44): n is a, c, g, or t
  modified_base (65)..(65): DNP phosphoramidite base
  misc_feature (65)..(65): n is a, c, g, or t
  modified_base (86)..(86): DNP phosphoramidite base
  misc_feature (86)..(86): n is a, c, g, or t
tnaactagtaaatctgaaatgtnacttcacattctacttaatcntaatttaaaatataaattcanttgtgcaacccataagaaagnt

SEQ ID NO: 1054 - DNA, 87 bp, Artificial Sequence
  Synthetic Probe
  modified_base (2)..(2): DNP phosphoramidite base
  misc_feature (2)..(2): n is a, c, g, or t
  modified_base (23)..(23): DNP phosphoramidite base
  misc_feature (23)..(23): n is a, c, g, or t
  modified_base (44)..(44): DNP phosphoramidite base
  misc_feature (44)..(44): n is a, c, g, or t
  modified_base (65)..(65): DNP phosphoramidite base
  misc_feature (65)..(65): n is a, c, g, or t
  modified_base (86)..(86): DNP phosphoramidite base
  misc_feature (86)..(86): n is a, c, g, or t
tnaaaattttgctttttcacaantggcaaaaaggaaagaatttngaacataatatttaatttttnaaaaaaattcagcctgactcnt

SEQ ID NO: 1055 - DNA, 87 bp, Artificial Sequence
  Synthetic Probe
  modified_base (2)..(2): DNP phosphoramidite base
  misc_feature (2)..(2): n is a, c, g, or t
  modified_base (23)..(23): DNP phosphoramidite base
  misc_feature (23)..(23): n is a, c, g, or t
  modified_base (44)..(44): DNP phosphoramidite base
  misc_feature (44)..(44): n is a, c, g, or t
  modified_base (65)..(65): DNP phosphoramidite base
  misc_feature (65)..(65): n is a, c, g, or t
  modified_base (86)..(86): DNP phosphoramidite base
  misc_feature (86)..(86): n is a, c, g, or t
tnctgagacatttacatcaaagncatacttccctgaacatgttncacatttaaaatgcttaaggntcttattattaaatccaaaant

SEQ ID NO: 1056 - DNA, 87 bp, Artificial Sequence
  Synthetic Probe
  modified_base (2)..(2): DNP phosphoramidite base
  misc_feature (2)..(2): n is a, c, g, or t
  modified_base (23)..(23): DNP phosphoramidite base
  misc_feature (23)..(23): n is a, c, g, or t
  modified_base (44)..(44): DNP phosphoramidite base
  misc_feature (44)..(44): n is a, c, g, or t
  modified_base (65)..(65): DNP phosphoramidite base
  misc_feature (65)..(65): n is a, c, g, or t
  modified_base (86)..(86): DNP phosphoramidite base
  misc_feature (86)..(86): n is a, c, g, or t
tnaaatagtttttagttgccgangtaaatatttaattatggganattgctttaaactcctcttcnataaactttaagaacattaant

SEQ ID NO: 1057 - DNA, 87 bp, Artificial Sequence
  Synthetic Probe
  modified_base (2)..(2): DNP phosphoramidite base
  misc_feature (2)..(2): n is a, c, g, or t
  modified_base (23)..(23): DNP phosphoramidite base
  misc_feature (23)..(23): n is a, c, g, or t
  modified_base (44)..(44): DNP phosphoramidite base
  misc_feature (44)..(44): n is a, c, g, or t
  modified_base (65)..(65): DNP phosphoramidite base
  misc_feature (65)..(65): n is a, c, g, or t
  modified_base (86)..(86): DNP phosphoramidite base
  misc_feature (86)..(86): n is a, c, g, or t
tnttaaggttatttttatgcatnaatagaattgctttcttctgnactaacctacatggcaaactnttccccaaccctctttttctnt

SEQ ID NO: 1058 - DNA, 87 bp, Artificial Sequence
  Synthetic Probe
  modified_base (2)..(2): DNP phosphoramidite base
  misc_feature (2)..(2): n is a, c, g, or t
  modified_base (23)..(23): DNP phosphoramidite base
  misc_feature (23)..(23): n is a, c, g, or t
  modified_base (44)..(44): DNP phosphoramidite base
  misc_feature (44)..(44): n is a, c, g, or t
  modified_base (65)..(65): DNP phosphoramidite base
  misc_feature (65)..(65): n is a, c, g, or t
  modified_base (86)..(86): DNP phosphoramidite base
  misc_feature (86)..(86): n is a, c, g, or t
tngatttctccagatatatcaantggagaacaaatatgtatgancactgttaattccagattctnaagaaaactgtcccaagagcnt

SEQ ID NO: 1059 - DNA, 87 bp, Artificial Sequence
  Synthetic Probe
  modified_base (2)..(2): DNP phosphoramidite base
  misc_feature (2)..(2): n is a, c, g, or t
  modified_base (23)..(23): DNP phosphoramidite base
  misc_feature (23)..(23): n is a, c, g, or t
  modified_base (44)..(44): DNP phosphoramidite base
  misc_feature (44)..(44): n is a, c, g, or t
  modified_base (65)..(65): DNP phosphoramidite base
  misc_feature (65)..(65): n is a, c, g, or t
  modified_base (86)..(86): DNP phosphoramidite base
  misc_feature (86)..(86): n is a, c, g, or t
tngcaattgtagggttttagaanttaaacaagtatatgcagagnatttaaaagggtgcttataanactatcagtccagttttcttnt

SEQ ID NO: 1060 - DNA, 87 bp, Artificial Sequence
  Synthetic Probe
  modified_base (2)..(2): DNP phosphoramidite base
  misc_feature (2)..(2): n is a, c, g, or t
  modified_base (23)..(23): DNP phosphoramidite base
  misc_feature (23)..(23): n is a, c, g, or t
  modified_base (44)..(44): DNP phosphoramidite base
  misc_feature (44)..(44): n is a, c, g, or t
  modified_base (65)..(65): DNP phosphoramidite base
  misc_feature (65)..(65): n is a, c, g, or t
  modified_base (86)..(86): DNP phosphoramidite base
  misc_feature (86)..(86): n is a, c, g, or t
tngttaggagtaagctggatgtnatttataaatttggattattntgaattttgacatgcatcaantttgtggttttaatttttgant

SEQ ID NO: 1061 - DNA, 87 bp, Artificial Sequence
  Synthetic Probe
  modified_base (2)..(2): DNP phosphoramidite base
  misc_feature (2)..(2): n is a, c, g, or t
  modified_base (23)..(23): DNP phosphoramidite base
  misc_feature (23)..(23): n is a, c, g, or t
  modified_base (44)..(44): DNP phosphoramidite base
  misc_feature (44)..(44): n is a, c, g, or t
  modified_base (65)..(65): DNP phosphoramidite base
  misc_feature (65)..(65): n is a, c, g, or t
  modified_base (86)..(86): DNP phosphoramidite base
  misc_feature (86)..(86): n is a, c, g, or t
tnggaaaacatatgcagacaatntattccacatctctaataagnttctcgatattccaaattttngctactgagctatgtatgctnt

SEQ ID NO: 1062 - DNA, 87 bp, Artificial Sequence
  Synthetic Probe
  modified_base (2)..(2): DNP phosphoramidite base
  misc_feature (2)..(2): n is a, c, g, or t
  modified_base (23)..(23): DNP phosphoramidite base
  misc_feature (23)..(23): n is a, c, g, or t
  modified_base (44)..(44): DNP phosphoramidite base
  misc_feature (44)..(44): n is a, c, g, or t
  modified_base (65)..(65): DNP phosphoramidite base
  misc_feature (65)..(65): n is a, c, g, or t
  modified_base (86)..(86): DNP phosphoramidite base
  misc_feature (86)..(86): n is a, c, g, or t
tnctctggaatgttattggttantaactttctgaaaccatgaanactcatctagttttcatttcntttcacacattaaactcattnt

SEQ ID NO: 1063 - DNA, 87 bp, Artificial Sequence
  Synthetic Probe
  modified_base (2)..(2): DNP phosphoramidite base
  misc_feature (2)..(2): n is a, c, g, or t
  modified_base (23)..(23): DNP phosphoramidite base
  misc_feature (23)..(23): n is a, c, g, or t
  modified_base (44)..(44): DNP phosphoramidite base
  misc_feature (44)..(44): n is a, c, g, or t
  modified_base (65)..(65): DNP phosphoramidite base
  misc_feature (65)..(65): n is a, c, g, or t
  modified_base (86)..(86): DNP phosphoramidite base
  misc_feature (86)..(86): n is a, c, g, or t
tntttaaatacagtgtttgaatnttgcattctctctctctattncttaagcatatcattttcgantcaatcaggaacagaagttcnt

SEQ ID NO: 1064 - DNA, 87 bp, Artificial Sequence
  Synthetic Probe
  modified_base (2)..(2): DNP phosphoramidite base
  misc_feature (2)..(2): n is a, c, g, or t
  modified_base (23)..(23): DNP phosphoramidite base
  misc_feature (23)..(23): n is a, c, g, or t
  modified_base (44)..(44): DNP phosphoramidite base
  misc_feature (44)..(44): n is a, c, g, or t
  modified_base (65)..(65): DNP phosphoramidite base
  misc_feature (65)..(65): n is a, c, g, or t
  modified_base (86)..(86): DNP phosphoramidite base
  misc_feature (86)..(86): n is a, c, g, or t
tnttatgagttgaaataacaaanaaaaatgaacattgtggctanaatactttaagtcacactggnagagggaaatgaattagcaant

SEQ ID NO: 1065 - DNA, 87 bp, Artificial Sequence
  Synthetic Probe
  modified_base (2)..(2): DNP phosphoramidite base
  misc_feature (2)..(2): n is a, c, g, or t
  modified_base (23)..(23): DNP phosphoramidite base
  misc_feature (23)..(23): n is a, c, g, or t
  modified_base (44)..(44): DNP phosphoramidite base
  misc_feature (44)..(44): n is a, c, g, or t
  modified_base (65)..(65): DNP phosphoramidite base
  misc_feature (65)..(65): n is a, c, g, or t
  modified_base (86)..(86): DNP phosphoramidite base
  misc_feature (86)..(86): n is a, c, g, or t
tngatttttaaaaatagctaaanaattactctgtatgacttgtntattaatgacagtccccagtnatggcttaatgtgtattgtcnt

SEQ ID NO: 1066 - DNA, 87 bp, Artificial Sequence
  Synthetic Probe
  modified_base (2)..(2): DNP phosphoramidite base
  misc_feature (2)..(2): n is a, c, g, or t
  modified_base (23)..(23): DNP phosphoramidite base
  misc_feature (23)..(23): n is a, c, g, or t
  modified_base (44)..(44): DNP phosphoramidite base
  misc_feature (44)..(44): n is a, c, g, or t
  modified_base (65)..(65): DNP phosphoramidite base
  misc_feature (65)..(65): n is a, c, g, or t
  modified_base (86)..(86): DNP phosphoramidite base
  misc_feature (86)..(86): n is a, c, g, or t
tnttcagaaggaagaaaaccagncagttacaatgtttcctgtcnaggtgataagaaaagtgtgantttctaaaagaccacactgant

SEQ ID NO: 1067 - DNA, 87 bp, Artificial Sequence
  Synthetic Probe
  modified_base (2)..(2): DNP phosphoramidite base
  misc_feature (2)..(2): n is a, c, g, or t
  modified_base (23)..(23): DNP phosphoramidite base
  misc_feature (23)..(23): n is a, c, g, or t
  modified_base (44)..(44): DNP phosphoramidite base
  misc_feature (44)..(44): n is a, c, g, or t
  modified_base (65)..(65): DNP phosphoramidite base
  misc_feature (65)..(65): n is a, c, g, or t
  modified_base (86)..(86): DNP phosphoramidite base
  misc_feature (86)..(86): n is a, c, g, or t
tntctgaagtctaccaaataagnaaaatattacagacctcagtngtgattcttcagaaagcaaanagtgtaaatatggcttatggnt

SEQ ID NO: 1068 - DNA, 87 bp, Artificial Sequence
  Synthetic Probe
  modified_base (2)..(2): DNP phosphoramidite base
  misc_feature (2)..(2): n is a, c, g, or t
  modified_base (23)..(23): DNP phosphoramidite base
  misc_feature (23)..(23): n is a, c, g, or t
  modified_base (44)..(44): DNP phosphoramidite base
  misc_feature (44)..(44): n is a, c, g, or t
  modified_base (65)..(65): DNP phosphoramidite base
  misc_feature (65)..(65): n is a, c, g, or t
  modified_base (86)..(86): DNP phosphoramidite base
  misc_feature (86)..(86): n is a, c, g, or t
tncctagaacacaactgatgggnaacctcttcacgcttcctganaaatcagaacctaatgtggancttatttactaacctgcacgnt

SEQ ID NO: 1069 - DNA, 87 bp, Artificial Sequence
  Synthetic Probe
  modified_base (2)..(2): DNP phosphoramidite base
  misc_feature (2)..(2): n is a, c, g, or t
  modified_base (23)..(23): DNP phosphoramidite base
  misc_feature (23)..(23): n is a, c, g, or t
  modified_base (44)..(44): DNP phosphoramidite base
  misc_feature (44)..(44): n is a, c, g, or t
  modified_base (65)..(65): DNP phosphoramidite base
  misc_feature (65)..(65): n is a, c, g, or t
  modified_base (86)..(86): DNP phosphoramidite base
  misc_feature (86)..(86): n is a, c, g, or t
tnaaaatggagaacattttattntgctttatttttcatgagttntgaattttgtgcagtaaattntatcattttttacaaaaacant

SEQ ID NO: 1070 - DNA, 87 bp, Artificial Sequence
  Synthetic Probe
  modified_base (2)..(2): DNP phosphoramidite base
  misc_feature (2)..(2): n is a, c, g, or t
  modified_base (23)..(23): DNP phosphoramidite base
  misc_feature (23)..(23): n is a, c, g, or t
  modified_base (44)..(44): DNP phosphoramidite base
  misc_feature (44)..(44): n is a, c, g, or t
  modified_base (65)..(65): DNP phosphoramidite base
  misc_feature (65)..(65): n is a, c, g, or t
  modified_base (86)..(86): DNP phosphoramidite base
  misc_feature (86)..(86): n is a, c, g, or t
tncattaaaatgcctattgtttntgtattatcaaatcatttgangtcaaaaagtgctctttttgngaaataattctcttaataaant

SEQ ID NO: 1071 - DNA, 87 bp, Artificial Sequence
  Synthetic Probe
  modified_base (2)..(2): DNP phosphoramidite base
  misc_feature (2)..(2): n is a, c, g, or t
  modified_base (23)..(23): DNP phosphoramidite base
  misc_feature (23)..(23): n is a, c, g, or t
  modified_base (44)..(44): DNP phosphoramidite base
  misc_feature (44)..(44): n is a, c, g, or t
  modified_base (65)..(65): DNP phosphoramidite base
  misc_feature (65)..(65): n is a, c, g, or t
  modified_base (86)..(86): DNP phosphoramidite base
  misc_feature (86)..(86): n is a, c, g, or t
tnatagaattttcacttttgtanatagtgctcagaagagaaatnttcctccaacataactctganacaagaactagggaaataatnt

SEQ ID NO: 1072 - DNA, 87 bp, Artificial Sequence
  Synthetic Probe
  modified_base (2)..(2): DNP phosphoramidite base
  misc_feature (2)..(2): n is a, c, g, or t
  modified_base (23)..(23): DNP phosphoramidite base
  misc_feature (23)..(23): n is a, c, g, or t
  modified_base (44)..(44): DNP phosphoramidite base
  misc_feature (44)..(44): n is a, c, g, or t
  modified_base (65)..(65): DNP phosphoramidite base
  misc_feature (65)..(65): n is a, c, g, or t
  modified_base (86)..(86): DNP phosphoramidite base
  misc_feature (86)..(86): n is a, c, g, or t
tncatttattagtatatgtaaanatggtactcttctaatattcnatatattaaatatgagccctnctagtaaaacatagagtcatnt

SEQ ID NO: 1073 - DNA, 87 bp, Artificial Sequence
  Synthetic Probe
  modified_base (2)..(2): DNP phosphoramidite base
  misc_feature (2)..(2): n is a, c, g, or t
  modified_base (23)..(23): DNP phosphoramidite base
  misc_feature (23)..(23): n is a, c, g, or t
  modified_base (44)..(44): DNP phosphoramidite base
  misc_feature (44)..(44): n is a, c, g, or t
  modified_base (65)..(65): DNP phosphoramidite base
  misc_feature (65)..(65): n is a, c, g, or t
  modified_base (86)..(86): DNP phosphoramidite base
  misc_feature (86)..(86): n is a, c, g, or t
tnctttggaaatgaaaaagggtntaaacattaaaagtaaacacntaagacaaaagagaagaactnagattaaaataaacaataaant

SEQ ID NO: 1074 - DNA, 87 bp, Artificial Sequence
  Synthetic Probe
  modified_base (2)..(2): DNP phosphoramidite base
  misc_feature (2)..(2): n is a, c, g, or t
  modified_base (23)..(23): DNP phosphoramidite base
  misc_feature (23)..(23): n is a, c, g, or t
  modified_base (44)..(44): DNP phosphoramidite base
  misc_feature (44)..(44): n is a, c, g, or t
  modified_base (65)..(65): DNP phosphoramidite base
  misc_feature (65)..(65): n is a, c, g, or t
  modified_base (86)..(86): DNP phosphoramidite base
  misc_feature (86)..(86): n is a, c, g, or t
tntttatctcagaaagcaatttnaagtttgaggtaaaagaatanaaggaaagaactggtgaacangccaaacaaatataaggttant

SEQ ID NO: 1075 - DNA, 87 bp, Artificial Sequence
  Synthetic Probe
  modified_base (2)..(2): DNP phosphoramidite base
  misc_feature (2)..(2): n is a, c, g, or t
  modified_base (23)..(23): DNP phosphoramidite base
  misc_feature (23)..(23): n is a, c, g, or t
  modified_base (44)..(44): DNP phosphoramidite base
  misc_feature (44)..(44): n is a, c, g, or t
  modified_base (65)..(65): DNP phosphoramidite base
  misc_feature (65)..(65): n is a, c, g, or t
  modified_base (86)..(86): DNP phosphoramidite base
  misc_feature (86)..(86): n is a, c, g, or t
tnaccttatttgttgtatagctnatcccaaataattaattttcncatcttgagaagcactgactnagcagcctagaggaacaaacnt

SEQ ID NO: 1076 - DNA, 87 bp, Artificial Sequence
  Synthetic Probe
  modified_base (2)..(2): DNP phosphoramidite base
  misc_feature (2)..(2): n is a, c, g, or t
  modified_base (23)..(23): DNP phosphoramidite base
  misc_feature (23)..(23): n is a, c, g, or t
  modified_base (44)..(44): DNP phosphoramidite base
  misc_feature (44)..(44): n is a, c, g, or t
  modified_base (65)..(65): DNP phosphoramidite base
  misc_feature (65)..(65): n is a, c, g, or t
  modified_base (86)..(86): DNP phosphoramidite base
  misc_feature (86)..(86): n is a, c, g, or t
tnttctactttataattttagtngtctcctgggagaagagaatnaaatgtgcaacttctattaanaacatagaagtttcttggttnt

SEQ ID NO: 1077 - DNA, 87 bp, Artificial Sequence
  Synthetic Probe
  modified_base (2)..(2): DNP phosphoramidite base
  misc_feature (2)..(2): n is a, c, g, or t
  modified_base (23)..(23): DNP phosphoramidite base
  misc_feature (23)..(23): n is a, c, g, or t
  modified_base (44)..(44): DNP phosphoramidite base
  misc_feature (44)..(44): n is a, c, g, or t
  modified_base (65)..(65): DNP phosphoramidite base
  misc_feature (65)..(65): n is a, c, g, or t
  modified_base (86)..(86): DNP phosphoramidite base
  misc_feature (86)..(86): n is a, c, g, or t
tngtaaaccactgtgatagcagnacacatctgctattgccagancaatggaaaaacataggctgntgctgtagccttatacacatnt

SEQ ID NO: 1078 - DNA, 87 bp, Artificial Sequence
  Synthetic Probe
  modified_base (2)..(2): DNP phosphoramidite base
  misc_feature (2)..(2): n is a, c, g, or t
  modified_base (23)..(23): DNP phosphoramidite base
  misc_feature (23)..(23): n is a, c, g, or t
  modified_base (44)..(44): DNP phosphoramidite base
  misc_feature (44)..(44): n is a, c, g, or t
  modified_base (65)..(65): DNP phosphoramidite base
  misc_feature (65)..(65): n is a, c, g, or t
  modified_base (86)..(86): DNP phosphoramidite base
  misc_feature (86)..(86): n is a, c, g, or t
tnggagtaaaagatgtattcagntacaaacacctttgtttcatngtaatttccattatttgcganatttatgtaataacaaactant

SEQ ID NO: 1079 - DNA, 87 bp, Artificial Sequence
  Synthetic Probe
  modified_base (2)..(2): DNP phosphoramidite base
  misc_feature (2)..(2): n is a, c, g, or t
  modified_base (23)..(23): DNP phosphoramidite base
  misc_feature (23)..(23): n is a, c, g, or t
  modified_base (44)..(44): DNP phosphoramidite base
  misc_feature (44)..(44): n is a, c, g, or t
  modified_base (65)..(65): DNP phosphoramidite base
  misc_feature (65)..(65): n is a, c, g, or t
  modified_base (86)..(86): DNP phosphoramidite base
  misc_feature (86)..(86): n is a, c, g, or t
tncttatgaactgaaatttcaangcttcatatacagtaaaaacngctttgtgcctatttaaaaanacaaagaatgtctgcaatgtnt

SEQ ID NO: 1080 - DNA, 87 bp, Artificial Sequence
  Synthetic Probe
  modified_base (2)..(2): DNP phosphoramidite base
  misc_feature (2)..(2): n is a, c, g, or t
  modified_base (23)..(23): DNP phosphoramidite base
  misc_feature (23)..(23): n is a, c, g, or t
  modified_base (44)..(44): DNP phosphoramidite base
  misc_feature (44)..(44): n is a, c, g, or t
  modified_base (65)..(65): DNP phosphoramidite base
  misc_feature (65)..(65): n is a, c, g, or t
  modified_base (86)..(86): DNP phosphoramidite base
  misc_feature (86)..(86): n is a, c, g, or t
tntaaagactgcaaagaacatantttaataaaaaaagttttacnaccaaacatcagtttttttcnaaatttatcagttaacaaatnt

SEQ ID NO: 1081 - DNA, 87 bp, Artificial Sequence
  Synthetic Probe
  modified_base (2)..(2): DNP phosphoramidite base
  misc_feature (2)..(2): n is a, c, g, or t
  modified_base (23)..(23): DNP phosphoramidite base
  misc_feature (23)..(23): n is a, c, g, or t
  modified_base (44)..(44): DNP phosphoramidite base
  misc_feature (44)..(44): n is a, c, g, or t
  modified_base (65)..(65): DNP phosphoramidite base
  misc_feature (65)..(65): n is a, c, g, or t
  modified_base (86)..(86): DNP phosphoramidite base
  misc_feature (86)..(86): n is a, c, g, or t
tnttttttctatacagtgtttanagtacttgcatagtcctgggncaaggagaacgcacaagatgntttgctgaataaatgtcccant

SEQ ID NO: 1082 - DNA, 87 bp, Artificial Sequence
  Synthetic Probe
  modified_base (2)..(2): DNP phosphoramidite base
  misc_feature (2)..(2): n is a, c, g, or t
  modified_base (23)..(23): DNP phosphoramidite base
  misc_feature (23)..(23): n is a, c, g, or t
  modified_base (44)..(44): DNP phosphoramidite base
  misc_feature (44)..(44): n is a, c, g, or t
  modified_base (65)..(65): DNP phosphoramidite base
  misc_feature (65)..(65): n is a, c, g, or t
  modified_base (86)..(86): DNP phosphoramidite base
  misc_feature (86)..(86): n is a, c, g, or t
tnttaatatagactgataaactnaataggcaaattttgtagatntcctggtactaaataagtgcntaacattttgaaatgaaaagnt

SEQ ID NO: 1083 - DNA, 87 bp, Artificial Sequence
  Synthetic Probe
  modified_base (2)..(2): DNP phosphoramidite base
  misc_feature (2)..(2): n is a, c, g, or t
  modified_base (23)..(23): DNP phosphoramidite base
  misc_feature (23)..(23): n is a, c, g, or t
  modified_base (44)..(44): DNP phosphoramidite base
  misc_feature (44)..(44): n is a, c, g, or t
  modified_base (65)..(65): DNP phosphoramidite base
  misc_feature (65)..(65): n is a, c, g, or t
  modified_base (86)..(86): DNP phosphoramidite base
  misc_feature (86)..(86): n is a, c, g, or t
tngagagcaagagaaagattcangttctctacttacatcttaantctggttttacaatactgacnatataacttctttttggaccnt

SEQ ID NO: 1084 - DNA, 87 bp, Artificial Sequence
  Synthetic Probe
  modified_base (2)..(2): DNP phosphoramidite base
  misc_feature (2)..(2): n is a, c, g, or t
  modified_base (23)..(23): DNP phosphoramidite base
  misc_feature (23)..(23): n is a, c, g, or t
  modified_base (44)..(44): DNP phosphoramidite base
  misc_feature (44)..(44): n is a, c, g, or t
  modified_base (65)..(65): DNP phosphoramidite base
  misc_feature (65)..(65): n is a, c, g, or t
  modified_base (86)..(86): DNP phosphoramidite base
  misc_feature (86)..(86): n is a, c, g, or t
tnactgaagggttgtatacaagnaacatgatcagaggatggagngagaaattccaagttgtagtnattcaaggctgaattatgggnt

SEQ ID NO: 1085 - DNA, 87 bp, Artificial Sequence
  Synthetic Probe
  modified_base (2)..(2): DNP phosphoramidite base
  misc_feature (2)..(2): n is a, c, g, or t
  modified_base (23)..(23): DNP phosphoramidite base
  misc_feature (23)..(23): n is a, c, g, or t
  modified_base (44)..(44): DNP phosphoramidite base
  misc_feature (44)..(44): n is a, c, g, or t
  modified_base (65)..(65): DNP phosphoramidite base
  misc_feature (65)..(65): n is a, c, g, or t
  modified_base (86)..(86): DNP phosphoramidite base
  misc_feature (86)..(86): n is a, c, g, or t
tnaatttggttttgatgtctatngctacaatcgcatcaactatnggtacaaatatctgtttattnatgttcagacaaaaagaaaant

SEQ ID NO: 1086 - DNA, 87 bp, Artificial Sequence
  Synthetic Probe
  modified_base (2)..(2): DNP phosphoramidite base
  misc_feature (2)..(2): n is a, c, g, or t
  modified_base (23)..(23): DNP phosphoramidite base
  misc_feature (23)..(23): n is a, c, g, or t
  modified_base (44)..(44): DNP phosphoramidite base
  misc_feature (44)..(44): n is a, c, g, or t
  modified_base (65)..(65): DNP phosphoramidite base
  misc_feature (65)..(65): n is a, c, g, or t
  modified_base (86)..(86): DNP phosphoramidite base
  misc_feature (86)..(86): n is a, c, g, or t
tnaactaaaatcattctaatatntccatttccaatttaatattngtggcatatttctctgtttantccaaattttccatctttatnt

SEQ ID NO: 1087 - DNA, 87 bp, Artificial Sequence
  Synthetic Probe
  modified_base (2)..(2): DNP phosphoramidite base
  misc_feature (2)..(2): n is a, c, g, or t
  modified_base (23)..(23): DNP phosphoramidite base
  misc_feature (23)..(23): n is a, c, g, or t
  modified_base (44)..(44): DNP phosphoramidite base
  misc_feature (44)..(44): n is a, c, g, or t
  modified_base (65)..(65): DNP phosphoramidite base
  misc_feature (65)..(65): n is a, c, g, or t
  modified_base (86)..(86): DNP phosphoramidite base
  misc_feature (86)..(86): n is a, c, g, or t
tnaggggctgagaaatgttgctnaagctgcaaaatcagaacccnttgtgatgcctgtgccagacnaaccgcaacctttctttggant

SEQ ID NO: 1088 - DNA, 87 bp, Artificial Sequence
  Synthetic Probe
  modified_base (2)..(2): DNP phosphoramidite base
  misc_feature (2)..(2): n is a, c, g, or t
  modified_base (23)..(23): DNP phosphoramidite base
  misc_feature (23)..(23): n is a, c, g, or t
  modified_base (44)..(44): DNP phosphoramidite base
  misc_feature (44)..(44): n is a, c, g, or t
  modified_base (65)..(65): DNP phosphoramidite base
  misc_feature (65)..(65): n is a, c, g, or t
  modified_base (86)..(86): DNP phosphoramidite base
  misc_feature (86)..(86): n is a, c, g, or t
tngaaatgtcaaagctgcccttnttttcccctttcctttttgcntgctaaaaagaggaactaacnttttcactctttaaaaaaaant

SEQ ID NO: 1089 - DNA, 87 bp, Artificial Sequence
  Synthetic Probe
  modified_base (2)..(2): DNP phosphoramidite base
  misc_feature (2)..(2): n is a, c, g, or t
  modified_base (23)..(23): DNP phosphoramidite base
  misc_feature (23)..(23): n is a, c, g, or t
  modified_base (44)..(44): DNP phosphoramidite base
  misc_feature (44)..(44): n is a, c, g, or t
  modified_base (65)..(65): DNP phosphoramidite base
  misc_feature (65)..(65): n is a, c, g, or t
  modified_base (86)..(86): DNP phosphoramidite base
  misc_feature (86)..(86): n is a, c, g, or t
tntctagcacagaccaatagatntataaactactctaagacaanacctaaaggctgactagggtnaaaaaaaggccataggatgcnt

SEQ ID NO: 1090 - DNA, 87 bp, Artificial Sequence
  Synthetic Probe
  modified_base (2)..(2): DNP phosphoramidite base
  misc_feature (2)..(2): n is a, c, g, or t
  modified_base (23)..(23): DNP phosphoramidite base
  misc_feature (23)..(23): n is a, c, g, or t
  modified_base (44)..(44): DNP phosphoramidite base
  misc_feature (44)..(44): n is a, c, g, or t
  modified_base (65)..(65): DNP phosphoramidite base
  misc_feature (65)..(65): n is a, c, g, or t
  modified_base (86)..(86): DNP phosphoramidite base
  misc_feature (86)..(86): n is a, c, g, or t
tnctgaagaaatcctccattggngtcttagccaggcggactaanctgcagcatcaattaattcangtgttccttaaagtttaaaant

SEQ ID NO: 1091 - DNA, 87 bp, Artificial Sequence
  Synthetic Probe
  modified_base (2)..(2): DNP phosphoramidite base
  misc_feature (2)..(2): n is a, c, g, or t
  modified_base (23)..(23): DNP phosphoramidite base
  misc_feature (23)..(23): n is a, c, g, or t
  modified_base (44)..(44): DNP phosphoramidite base
  misc_feature (44)..(44): n is a, c, g, or t
  modified_base (65)..(65): DNP phosphoramidite base
  misc_feature (65)..(65): n is a, c, g, or t
  modified_base (86)..(86): DNP phosphoramidite base
  misc_feature (86)..(86): n is a, c, g, or t
tncagtaaaccaaaaaaatcatnttctcactgatcagacttttncctgaaataatgataaaaacnacgaagtgattacagacagant

SEQ ID NO: 1092 - DNA, 87 bp, Artificial Sequence
  Synthetic Probe
  modified_base (2)..(2): DNP phosphoramidite base
  misc_feature (2)..(2): n is a, c, g, or t
  modified_base (23)..(23): DNP phosphoramidite base
  misc_feature (23)..(23): n is a, c, g, or t
  modified_base (44)..(44): DNP phosphoramidite base
  misc_feature (44)..(44): n is a, c, g, or t
  modified_base (65)..(65): DNP phosphoramidite base
  misc_feature (65)..(65): n is a, c, g, or t
  modified_base (86)..(86): DNP phosphoramidite base
  misc_feature (86)..(86): n is a, c, g, or t
tnacataggggagcagaatctcncccaaaggcttaccaacagtntcaatgaccagctgtaccctnccacccccaccacacagacant

SEQ ID NO: 1093 - DNA, 87 bp, Artificial Sequence
  Synthetic Probe
  modified_base (2)..(2): DNP phosphoramidite base
  misc_feature (2)..(2): n is a, c, g, or t
  modified_base (23)..(23): DNP phosphoramidite base
  misc_feature (23)..(23): n is a, c, g, or t
  modified_base (44)..(44): DNP phosphoramidite base
  misc_feature (44)..(44): n is a, c, g, or t
  modified_base (65)..(65): DNP phosphoramidite base
  misc_feature (65)..(65): n is a, c, g, or t
  modified_base (86)..(86): DNP phosphoramidite base
  misc_feature (86)..(86): n is a, c, g, or t
tnttttatcttgttttttgtttntgctaccaagttactcattantattgagcatttttcagtacnccttaaagtaaaacaattcant

SEQ ID NO: 1094 - DNA, 87 bp, Artificial Sequence
  Synthetic Probe
  modified_base (2)..(2): DNP phosphoramidite base
  misc_feature (2)..(2): n is a, c, g, or t
  modified_base (23)..(23): DNP phosphoramidite base
  misc_feature (23)..(23): n is a, c, g, or t
  modified_base (44)..(44): DNP phosphoramidite base
  misc_feature (44)..(44): n is a, c, g, or t
  modified_base (65)..(65): DNP phosphoramidite base
  misc_feature (65)..(65): n is a, c, g, or t
  modified_base (86)..(86): DNP phosphoramidite base
  misc_feature (86)..(86): n is a, c, g, or t
tntgtcatcagtcgatataggcnacaaattgaccaagaagaaanaacaagttatttctccatgtnatcataaatggatccatttgnt

SEQ ID NO: 1095 - DNA, 87 bp, Artificial Sequence
  Synthetic Probe
  modified_base (2)..(2): DNP phosphoramidite base
  misc_feature (2)..(2): n is a, c, g, or t
  modified_base (23)..(23): DNP phosphoramidite base
  misc_feature (23)..(23): n is a, c, g, or t
  modified_base (44)..(44): DNP phosphoramidite base
  misc_feature (44)..(44): n is a, c, g, or t
  modified_base (65)..(65): DNP phosphoramidite base
  misc_feature (65)..(65): n is a, c, g, or t
  modified_base (86)..(86): DNP phosphoramidite base
  misc_feature (86)..(86): n is a, c, g, or t
tntttgtaataactacacagtantatgaacaaaccctgctaaangccaaaagtggaggaacaatntaagctgttactgccataaant

SEQ ID NO: 1096 - DNA, 87 bp, Artificial Sequence
  Synthetic Probe
  modified_base (2)..(2): DNP phosphoramidite base
  misc_feature (2)..(2): n is a, c, g, or t
  modified_base (23)..(23): DNP phosphoramidite base
  misc_feature (23)..(23): n is a, c, g, or t
  modified_base (44)..(44): DNP phosphoramidite base
  misc_feature (44)..(44): n is a, c, g, or t
  modified_base (65)..(65): DNP phosphoramidite base
  misc_feature (65)..(65): n is a, c, g, or t
  modified_base (86)..(86): DNP phosphoramidite base
  misc_feature (86)..(86): n is a, c, g, or t
tntttctatttcaaaaaagatanaaataacacatctttcagcanattctggaagaaaaggctctnctataaacatactggaaaatnt

SEQ ID NO: 1097 - DNA, 87 bp, Artificial Sequence
  Synthetic Probe
  modified_base (2)..(2): DNP phosphoramidite base
  misc_feature (2)..(2): n is a, c, g, or t
  modified_base (23)..(23): DNP phosphoramidite base
  misc_feature (23)..(23): n is a, c, g, or t
  modified_base (44)..(44): DNP phosphoramidite base
  misc_feature (44)..(44): n is a, c, g, or t
  modified_base (65)..(65): DNP phosphoramidite base
  misc_feature (65)..(65): n is a, c, g, or t
  modified_base (86)..(86): DNP phosphoramidite base
  misc_feature (86)..(86): n is a, c, g, or t
tnttcattctttctaatcgtatntgtaattattcaggaggcttnaactaaagttaaaattttcanaatctattttttttaagttant

SEQ ID NO: 1098 - DNA, 87 bp, Artificial Sequence
  Synthetic Probe
  modified_base (2)..(2): DNP phosphoramidite base
  misc_feature (2)..(2): n is a, c, g, or t
  modified_base (23)..(23): DNP phosphoramidite base
  misc_feature (23)..(23): n is a, c, g, or t
  modified_base (44)..(44): DNP phosphoramidite base
  misc_feature (44)..(44): n is a, c, g, or t
  modified_base (65)..(65): DNP phosphoramidite base
  misc_feature (65)..(65): n is a, c, g, or t
  modified_base (86)..(86): DNP phosphoramidite base
  misc_feature (86)..(86): n is a, c, g, or t
tncatcactccaccagagggcantacaaaagaaaggtgataacngtgaaaacactcaaagttggntaacttgttagctttcagagnt

SEQ ID NO: 1099 - DNA, 87 bp, Artificial Sequence
  Synthetic Probe
  modified_base (2)..(2): DNP phosphoramidite base
  misc_feature (2)..(2): n is a, c, g, or t
  modified_base (23)..(23): DNP phosphoramidite base
  misc_feature (23)..(23): n is a, c, g, or t
  modified_base (44)..(44): DNP phosphoramidite base
  misc_feature (44)..(44): n is a, c, g, or t
  modified_base (65)..(65): DNP phosphoramidite base
  misc_feature (65)..(65): n is a, c, g, or t
  modified_base (86)..(86): DNP phosphoramidite base
  misc_feature (86)..(86): n is a, c, g, or t
tncaacacttagttccaattctntaattttcaaattgccccagnagtctatttttaaagtgtaanaagtatgtgctgacatacttnt

SEQ ID NO: 1100 - DNA, 87 bp, Artificial Sequence
  Synthetic Probe
  modified_base (2)..(2): DNP phosphoramidite base
  misc_feature (2)..(2): n is a, c, g, or t
  modified_base (23)..(23): DNP phosphoramidite base
  misc_feature (23)..(23): n is a, c, g, or t
  modified_base (44)..(44): DNP phosphoramidite base
  misc_feature (44)..(44): n is a, c, g, or t
  modified_base (65)..(65): DNP phosphoramidite base
  misc_feature (65)..(65): n is a, c, g, or t
  modified_base (86)..(86): DNP phosphoramidite base
  misc_feature (86)..(86): n is a, c, g, or t
tnacatgccaattgtttaaaagnaaacaattctacaggttaacnaaaggccaaagactcggaatnaacttcctaaataatgtttant

SEQ ID NO: 1101 - DNA, 87 bp, Artificial Sequence
  Synthetic Probe
  modified_base (2)..(2): DNP phosphoramidite base
  misc_feature (2)..(2): n is a, c, g, or t
  modified_base (23)..(23): DNP phosphoramidite base
  misc_feature (23)..(23): n is a, c, g, or t
  modified_base (44)..(44): DNP phosphoramidite base
  misc_feature (44)..(44): n is a, c, g, or t
  modified_base (65)..(65): DNP phosphoramidite base
  misc_feature (65)..(65): n is a, c, g, or t
  modified_base (86)..(86): DNP phosphoramidite base
  misc_feature (86)..(86): n is a, c, g, or t
tntgggcccacaaagagttgaanccaacctaaaatatcacaagnctgtatcaatcagttttatanaatgtatatacagagggttgnt

SEQ ID NO: 1102 - DNA, 87 bp, Artificial Sequence
  Synthetic Probe
  modified_base (2)..(2): DNP phosphoramidite base
  misc_feature (2)..(2): n is a, c, g, or t
  modified_base (23)..(23): DNP phosphoramidite base
  misc_feature (23)..(23): n is a, c, g, or t
  modified_base (44)..(44): DNP phosphoramidite base
  misc_feature (44)..(44): n is a, c, g, or t
  modified_base (65)..(65): DNP phosphoramidite base
  misc_feature (65)..(65): n is a, c, g, or t
  modified_base (86)..(86): DNP phosphoramidite base
  misc_feature (86)..(86): n is a, c, g, or t
tnacaacgttcaataagatgatnattttaaaagtttctatttcnagtttcaaattcatctacaanaccaaaatgcaacatggaaant

SEQ ID NO: 1103 - DNA, 87 bp, Artificial Sequence
  Synthetic Probe
  modified_base (2)..(2): DNP phosphoramidite base
  misc_feature (2)..(2): n is a, c, g, or t
  modified_base (23)..(23): DNP phosphoramidite base
  misc_feature (23)..(23): n is a, c, g, or t
  modified_base (44)..(44): DNP phosphoramidite base
  misc_feature (44)..(44): n is a, c, g, or t
  modified_base (65)..(65): DNP phosphoramidite base
  misc_feature (65)..(65): n is a, c, g, or t
  modified_base (86)..(86): DNP phosphoramidite base
  misc_feature (86)..(86): n is a, c, g, or t
tngtctttaagccacatactganaatatacagtaaattttcagnagcctaggatcagtagtaaanccaaaagccccaaactgaagnt

SEQ ID NO: 1104 - DNA, 87 bp, Artificial Sequence
  Synthetic Probe
  modified_base (2)..(2): DNP phosphoramidite base
  misc_feature (2)..(2): n is a, c, g, or t
  modified_base (23)..(23): DNP phosphoramidite base
  misc_feature (23)..(23): n is a, c, g, or t
  modified_base (44)..(44): DNP phosphoramidite base
  misc_feature (44)..(44): n is a, c, g, or t
  modified_base (65)..(65): DNP phosphoramidite base
  misc_feature (65)..(65): n is a, c, g, or t
  modified_base (86)..(86): DNP phosphoramidite base
  misc_feature (86)..(86): n is a, c, g, or t
tntttgaaaattcaacgttcccnttagcgaatagcaatacatantcaaagtatatggcaatcatnctgtgttctgaagcagaaaant

SEQ ID NO: 1105 - DNA, 87 bp, Artificial Sequence
  Synthetic Probe
  modified_base (2)..(2): DNP phosphoramidite base
  misc_feature (2)..(2): n is a, c, g, or t
  modified_base (23)..(23): DNP phosphoramidite base
  misc_feature (23)..(23): n is a, c, g, or t
  modified_base (44)..(44): DNP phosphoramidite base
  misc_feature (44)..(44): n is a, c, g, or t
  modified_base (65)..(65): DNP phosphoramidite base
  misc_feature (65)..(65): n is a, c, g, or t
  modified_base (86)..(86): DNP phosphoramidite base
  misc_feature (86)..(86): n is a, c, g, or t
tnccccaaactctggacattatnatcatttccaaaataaatctngaaacaaaaccattggactanattttggactcagcgtagaant

SEQ ID NO: 1106 - DNA, 87 bp, Artificial Sequence
  Synthetic Probe
  modified_base (2)..(2): DNP phosphoramidite base
  misc_feature (2)..(2): n is a, c, g, or t
  modified_base (23)..(23): DNP phosphoramidite base
  misc_feature (23)..(23): n is a, c, g, or t
  modified_base (44)..(44): DNP phosphoramidite base
  misc_feature (44)..(44): n is a, c, g, or t
  modified_base (65)..(65): DNP phosphoramidite base
  misc_feature (65)..(65): n is a, c, g, or t
  modified_base (86)..(86): DNP phosphoramidite base
  misc_feature (86)..(86): n is a, c, g, or t
tngctctgagttcctggaagganggcctcggggagtgacgaganaaccaggggggtctgcaggancttggaccgccgaccgttccnt

SEQ ID NO: 1107 - DNA, 87 bp, Artificial Sequence
  Synthetic Probe
  modified_base (2)..(2): DNP phosphoramidite base
  misc_feature (2)..(2): n is a, c, g, or t
  modified_base (23)..(23): DNP phosphoramidite base
  misc_feature (23)..(23): n is a, c, g, or t
  modified_base (44)..(44): DNP phosphoramidite base
  misc_feature (44)..(44): n is a, c, g, or t
  modified_base (65)..(65): DNP phosphoramidite base
  misc_feature (65)..(65): n is a, c, g, or t
  modified_base (86)..(86): DNP phosphoramidite base
  misc_feature (86)..(86): n is a, c, g, or t
tntcgctccccggggcgagcggntctggaccgcccgggaagtgncctgcgccggcggtcgtgggngccagttcccgcgtggcagcnt

SEQ ID NO: 1108 - DNA, 87 bp, Artificial Sequence
  Synthetic Probe
  modified_base (2)..(2): DNP phosphoramidite base
  misc_feature (2)..(2): n is a, c, g, or t
  modified_base (23)..(23): DNP phosphoramidite base
  misc_feature (23)..(23): n is a, c, g, or t
  modified_base (44)..(44): DNP phosphoramidite base
  misc_feature (44)..(44): n is a, c, g, or t
  modified_base (65)..(65): DNP phosphoramidite base
  misc_feature (65)..(65): n is a, c, g, or t
  modified_base (86)..(86): DNP phosphoramidite base
  misc_feature (86)..(86): n is a, c, g, or t
tntgggcgcgacacaggcgcgcncctcctcgtccctcccgggcnagcgtcggccgcccgagcccnggggagacccgccccgccccnt

SEQ ID NO: 1109 - DNA, 87 bp, Artificial Sequence
  Synthetic Probe
  modified_base (2)..(2): DNP phosphoramidite base
  misc_feature (2)..(2): n is a, c, g, or t
  modified_base (23)..(23): DNP phosphoramidite base
  misc_feature (23)..(23): n is a, c, g, or t
  modified_base (44)..(44): DNP phosphoramidite base
  misc_feature (44)..(44): n is a, c, g, or t
  modified_base (65)..(65): DNP phosphoramidite base
  misc_feature (65)..(65): n is a, c, g, or t
  modified_base (86)..(86): DNP phosphoramidite base
  misc_feature (86)..(86): n is a, c, g, or t
tngcgccgtcacccgggccccgnttccgcaggggtggctcgcgngcgccccacgtccctgcgagnaagcccgggatcgcttcgcgnt

SEQ ID NO: 1110 - DNA, 87 bp, Artificial Sequence
  Synthetic Probe
  modified_base (2)..(2): DNP phosphoramidite base
  misc_feature (2)..(2): n is a, c, g, or t
  modified_base (23)..(23): DNP phosphoramidite base
  misc_feature (23)..(23): n is a, c, g, or t
  modified_base (44)..(44): DNP phosphoramidite base
  misc_feature (44)..(44): n is a, c, g, or t
  modified_base (65)..(65): DNP phosphoramidite base
  misc_feature (65)..(65): n is a, c, g, or t
  modified_base (86)..(86): DNP phosphoramidite base
  misc_feature (86)..(86): n is a, c, g, or t
tngggcgcaccgacgagccgccngctcgcgagctcgccgcctancctggagggagctcaggcccngcgtcgaccgcgcgctgccgnt

SEQ ID NO: 1111 - DNA, 87 bp, Artificial Sequence
  Synthetic Probe
  modified_base (2)..(2): DNP phosphoramidite base
  misc_feature (2)..(2): n is a, c, g, or t
  modified_base (23)..(23): DNP phosphoramidite base
  misc_feature (23)..(23): n is a, c, g, or t
  modified_base (44)..(44): DNP phosphoramidite base
  misc_feature (44)..(44): n is a, c, g, or t
  modified_base (65)..(65): DNP phosphoramidite base
  misc_feature (65)..(65): n is a, c, g, or t
  modified_base (86)..(86): DNP phosphoramidite base
  misc_feature (86)..(86): n is a, c, g, or t
tngtgtccgctgggcgctcagcnagcccctggagcgcggagccnggcgtggagagcgcagctcancagccgagaccagagccgccnt

SEQ ID NO: 1112 - DNA, 87 bp, Artificial Sequence
  Synthetic Probe
  modified_base (2)..(2): DNP phosphoramidite base
  misc_feature (2)..(2): n is a, c, g, or t
  modified_base (23)..(23): DNP phosphoramidite base
  misc_feature (23)..(23): n is a, c, g, or t
  modified_base (44)..(44): DNP phosphoramidite base
  misc_feature (44)..(44): n is a, c, g, or t
  modified_base (65)..(65): DNP phosphoramidite base
  misc_feature (65)..(65): n is a, c, g, or t
  modified_base (86)..(86): DNP phosphoramidite base
  misc_feature (86)..(86): n is a, c, g, or t
tnggccacacccagtcccgcacnctcccagcagccaactccgcnggcgcgccggagccggggcgngggacgtggctggaggcgcgnt

SEQ ID NO: 1113 - DNA, 87 bp, Artificial Sequence
  Synthetic Probe
  modified_base (2)..(2): DNP phosphoramidite base
  misc_feature (2)..(2): n is a, c, g, or t
  modified_base (23)..(23): DNP phosphoramidite base
  misc_feature (23)..(23): n is a, c, g, or t
  modified_base (44)..(44): DNP phosphoramidite base
  misc_feature (44)..(44): n is a, c, g, or t
  modified_base (65)..(65): DNP phosphoramidite base
  misc_feature (65)..(65): n is a, c, g, or t
  modified_base (86)..(86): DNP phosphoramidite base
  misc_feature (86)..(86): n is a, c, g, or t
tnaggcgcgaggcacgaggcgcngcgggcccggcggggacgtgnccggggacgcgcagaccctcnggagcgcgcgcagcccgggcnt

SEQ ID NO: 1114 - DNA, 87 bp, Artificial Sequence
  Synthetic Probe
  modified_base (2)..(2): DNP phosphoramidite base
  misc_feature (2)..(2): n is a, c, g, or t
  modified_base (23)..(23): DNP phosphoramidite base
  misc_feature (23)..(23): n is a, c, g, or t
  modified_base (44)..(44): DNP phosphoramidite base
  misc_feature (44)..(44): n is a, c, g, or t
  modified_base (65)..(65): DNP phosphoramidite base
  misc_feature (65)..(65): n is a, c, g, or t
  modified_base (86)..(86): DNP phosphoramidite base
  misc_feature (86)..(86): n is a, c, g, or t
tncctattttctctctcgtttcnctgccagaaggagaagaaaanacattcattcccgggcagttntcgttttcttgttggtgtggnt

SEQ ID NO: 1115 - DNA, 87 bp, Artificial Sequence
  Synthetic Probe
  modified_base (2)..(2): DNP phosphoramidite base
  misc_feature (2)..(2): n is a, c, g, or t
  modified_base (23)..(23): DNP phosphoramidite base
  misc_feature (23)..(23): n is a, c, g, or t
  modified_base (44)..(44): DNP phosphoramidite base
  misc_feature (44)..(44): n is a, c, g, or t
  modified_base (65)..(65): DNP phosphoramidite base
  misc_feature (65)..(65): n is a, c, g, or t
  modified_base (86)..(86): DNP phosphoramidite base
  misc_feature (86)..(86): n is a, c, g, or t
tnaaatgtcataaaataaatgcnatctatccaatttgcttcctnctgaagtcagtaccgcctggngagcatttttcctctccccant

SEQ ID NO: 1116 - DNA, 87 bp, Artificial Sequence
  Synthetic Probe
  modified_base (2)..(2): DNP phosphoramidite base
  misc_feature (2)..(2): n is a, c, g, or t
  modified_base (23)..(23): DNP phosphoramidite base
  misc_feature (23)..(23): n is a, c, g, or t
  modified_base (44)..(44): DNP phosphoramidite base
  misc_feature (44)..(44): n is a, c, g, or t
  modified_base (65)..(65): DNP phosphoramidite base
  misc_feature (65)..(65): n is a, c, g, or t
  modified_base (86)..(86): DNP phosphoramidite base
  misc_feature (86)..(86): n is a, c, g, or t
tncccccatttttcttctgagtntaattccagtttgacagactngttgctatagcattccttctnctgacgtcaaacaatttaaant

SEQ ID NO: 1117 - DNA, 87 bp, Artificial Sequence
  Synthetic Probe
  modified_base (2)..(2): DNP phosphoramidite base
  misc_feature (2)..(2): n is a, c, g, or t
  modified_base (23)..(23): DNP phosphoramidite base
  misc_feature (23)..(23): n is a, c, g, or t
  modified_base (44)..(44): DNP phosphoramidite base
  misc_feature (44)..(44): n is a, c, g, or t
  modified_base (65)..(65): DNP phosphoramidite base
  misc_feature (65)..(65): n is a, c, g, or t
  modified_base (86)..(86): DNP phosphoramidite base
  misc_feature (86)..(86): n is a, c, g, or t
tnaaaattttcatttttactaantattaggagcatttttccatntaagaagaaagaaatgccaanatattctgcatatcaaagtgnt

SEQ ID NO: 1118 - DNA, 87 bp, Artificial Sequence
  Synthetic Probe
  modified_base (2)..(2): DNP phosphoramidite base
  misc_feature (2)..(2): n is a, c, g, or t
  modified_base (23)..(23): DNP phosphoramidite base
  misc_feature (23)..(23): n is a, c, g, or t
  modified_base (44)..(44): DNP phosphoramidite base
  misc_feature (44)..(44): n is a, c, g, or t
  modified_base (65)..(65): DNP phosphoramidite base
  misc_feature (65)..(65): n is a, c, g, or t
  modified_base (86)..(86): DNP phosphoramidite base
  misc_feature (86)..(86): n is a, c, g, or t
tntgcatctgtaactatttatgnttttaatgattaaatcctgangttttatgattgtcgtttttncggaggaagcaaagggaaatnt

SEQ ID NO: 1119 - DNA, 87 bp, Artificial Sequence
  Synthetic Probe
  modified_base (2)..(2): DNP phosphoramidite base
  misc_feature (2)..(2): n is a, c, g, or t
  modified_base (23)..(23): DNP phosphoramidite base
  misc_feature (23)..(23): n is a, c, g, or t
  modified_base (44)..(44): DNP phosphoramidite base
  misc_feature (44)..(44): n is a, c, g, or t
  modified_base (65)..(65): DNP phosphoramidite base
  misc_feature (65)..(65): n is a, c, g, or t
  modified_base (86)..(86): DNP phosphoramidite base
  misc_feature (86)..(86): n is a, c, g, or t
tntgagagctggttgttgggttnaagattatttgttgaaaaacnaagttgctggtatttaggaanaacacagtgggaagcaatgant

SEQ ID NO: 1120 - DNA, 87 bp, Artificial Sequence
  Synthetic Probe
  modified_base (2)..(2): DNP phosphoramidite base
  misc_feature (2)..(2): n is a, c, g, or t
  modified_base (23)..(23): DNP phosphoramidite base
  misc_feature (23)..(23): n is a, c, g, or t
  modified_base (44)..(44): DNP phosphoramidite base
  misc_feature (44)..(44): n is a, c, g, or t
  modified_base (65)..(65): DNP phosphoramidite base
  misc_feature (65)..(65): n is a, c, g, or t
  modified_base (86)..(86): DNP phosphoramidite base
  misc_feature (86)..(86): n is a, c, g, or t
tngggaaatataaatgaacagcntcctaaacataaaatacaaanacctgaaaagatgtaacaagnaatttgactgtcttttaaagnt

SEQ ID NO: 1121 - DNA, 87 bp, Artificial Sequence
  Synthetic Probe
  modified_base (2)..(2): DNP phosphoramidite base
  misc_feature (2)..(2): n is a, c, g, or t
  modified_base (23)..(23): DNP phosphoramidite base
  misc_feature (23)..(23): n is a, c, g, or t
  modified_base (44)..(44): DNP phosphoramidite base
  misc_feature (44)..(44): n is a, c, g, or t
  modified_base (65)..(65): DNP phosphoramidite base
  misc_feature (65)..(65): n is a, c, g, or t
  modified_base (86)..(86): DNP phosphoramidite base
  misc_feature (86)..(86): n is a, c, g, or t
tnaagtacagaaaaaggaaagtnttaattattatccaaacgaantctacttccaagaatattgtnatttctgttttgccatacctnt

SEQ ID NO: 1122 - DNA, 87 bp, Artificial Sequence
  Synthetic Probe
  modified_base (2)..(2): DNP phosphoramidite base
  misc_feature (2)..(2): n is a, c, g, or t
  modified_base (23)..(23): DNP phosphoramidite base
  misc_feature (23)..(23): n is a, c, g, or t
  modified_base (44)..(44): DNP phosphoramidite base
  misc_feature (44)..(44): n is a, c, g, or t
  modified_base (65)..(65): DNP phosphoramidite base
  misc_feature (65)..(65): n is a, c, g, or t
  modified_base (86)..(86): DNP phosphoramidite base
  misc_feature (86)..(86): n is a, c, g, or t
tnaagtgatccagcaattcatgnatttttccaatgataatgaanatccacgaagaacaaaagagnagagactgggaagggaggcant

SEQ ID NO: 1123 - DNA, 87 bp, Artificial Sequence
  Synthetic Probe
  modified_base (2)..(2): DNP phosphoramidite base
  misc_feature (2)..(2): n is a, c, g, or t
  modified_base (23)..(23): DNP phosphoramidite base
  misc_feature (23)..(23): n is a, c, g, or t
  modified_base (44)..(44): DNP phosphoramidite base
  misc_feature (44)..(44): n is a, c, g, or t
  modified_base (65)..(65): DNP phosphoramidite base
  misc_feature (65)..(65): n is a, c, g, or t
  modified_base (86)..(86): DNP phosphoramidite base
  misc_feature (86)..(86): n is a, c, g, or t
tngtgtttgaaatgaggccaaanttatatacatacaacatcacnaactaccgtaacagattttantttcacccacaacaaaataant

SEQ ID NO: 1124 - DNA, 87 bp, Artificial Sequence
  Synthetic Probe
  modified_base (2)..(2): DNP phosphoramidite base
  misc_feature (2)..(2): n is a, c, g, or t
  modified_base (23)..(23): DNP phosphoramidite base
  misc_feature (23)..(23): n is a, c, g, or t
  modified_base (44)..(44): DNP phosphoramidite base
  misc_feature (44)..(44): n is a, c, g, or t
  modified_base (65)..(65): DNP phosphoramidite base
  misc_feature (65)..(65): n is a, c, g, or t
  modified_base (86)..(86): DNP phosphoramidite base
  misc_feature (86)..(86): n is a, c, g, or t
tncaggatctacagcacagtttncccaaggacatgagaagcaanttccctagtagattctgtaangaagtcagtctatgtgtggtnt

SEQ ID NO: 1125 - DNA, 87 bp, Artificial Sequence
  Synthetic Probe
  modified_base (2)..(2): DNP phosphoramidite base
  misc_feature (2)..(2): n is a, c, g, or t
  modified_base (23)..(23): DNP phosphoramidite base
  misc_feature (23)..(23): n is a, c, g, or t
  modified_base (44)..(44): DNP phosphoramidite base
  misc_feature (44)..(44): n is a, c, g, or t
  modified_base (65)..(65): DNP phosphoramidite base
  misc_feature (65)..(65): n is a, c, g, or t
  modified_base (86)..(86): DNP phosphoramidite base
  misc_feature (86)..(86): n is a, c, g, or t
tnaacaaacaaaaaattaaaganacctgctctttagaaaaaaanctctaagatcaagagaataanttttgaatgcctcttcttacnt

SEQ ID NO: 1126 - DNA, 87 bp, Artificial Sequence
  Synthetic Probe
  modified_base (2)..(2): DNP phosphoramidite base
  misc_feature (2)..(2): n is a, c, g, or t
  modified_base (23)..(23): DNP phosphoramidite base
  misc_feature (23)..(23): n is a, c, g, or t
  modified_base (44)..(44): DNP phosphoramidite base
  misc_feature (44)..(44): n is a, c, g, or t
  modified_base (65)..(65): DNP phosphoramidite base
  misc_feature (65)..(65): n is a, c, g, or t
  modified_base (86)..(86): DNP phosphoramidite base
  misc_feature (86)..(86): n is a, c, g, or t
tncccaaggaatatttaagaganaaaaggattcatgaattcagnacttcctttagccatttcctnctaaatggaccaggatatccnt

SEQ ID NO: 1127 - DNA, 87 bp, Artificial Sequence
  Synthetic Probe
  modified_base (2)..(2): DNP phosphoramidite base
  misc_feature (2)..(2): n is a, c, g, or t
  modified_base (23)..(23): DNP phosphoramidite base
  misc_feature (23)..(23): n is a, c, g, or t
  modified_base (44)..(44): DNP phosphoramidite base
  misc_feature (44)..(44): n is a, c, g, or t
  modified_base (65)..(65): DNP phosphoramidite base
  misc_feature (65)..(65): n is a, c, g, or t
  modified_base (86)..(86): DNP phosphoramidite base
  misc_feature (86)..(86): n is a, c, g, or t
tnaaagctacattccactggttnttcccctttgtataattatgnctcattttgtagtgcctaganatgtaatacagtactttgtant

SEQ ID NO: 1128 - DNA, 87 bp, Artificial Sequence
  Synthetic Probe
  modified_base (2)..(2): DNP phosphoramidite base
  misc_feature (2)..(2): n is a, c, g, or t
  modified_base (23)..(23): DNP phosphoramidite base
  misc_feature (23)..(23): n is a, c, g, or t
  modified_base (44)..(44): DNP phosphoramidite base
  misc_feature (44)..(44): n is a, c, g, or t
  modified_base (65)..(65): DNP phosphoramidite base
  misc_feature (65)..(65): n is a, c, g, or t
  modified_base (86)..(86): DNP phosphoramidite base
  misc_feature (86)..(86): n is a, c, g, or t
tntaacaaaatgcttggttcaancattaatgcttctaggagtgngaatcttttcctggcaggtgnagatagtcaacgtggggtggnt

SEQ ID NO: 1129 - DNA, 87 bp, Artificial Sequence
  Synthetic Probe
  modified_base (2)..(2): DNP phosphoramidite base
  misc_feature (2)..(2): n is a, c, g, or t
  modified_base (23)..(23): DNP phosphoramidite base
  misc_feature (23)..(23): n is a, c, g, or t
  modified_base (44)..(44): DNP phosphoramidite base
  misc_feature (44)..(44): n is a, c, g, or t
  modified_base (65)..(65): DNP phosphoramidite base
  misc_feature (65)..(65): n is a, c, g, or t
  modified_base (86)..(86): DNP phosphoramidite base
  misc_feature (86)..(86): n is a, c, g, or t
tntctgtcagatggatttccaangcttaaaagctttgaatcagnaatgacattaatcctgctttnttctgcattgtggccttattnt

SEQ ID NO: 1130 - DNA, 87 bp, Artificial Sequence
  Synthetic Probe
  modified_base (2)..(2): DNP phosphoramidite base
  misc_feature (2)..(2): n is a, c, g, or t
  modified_base (23)..(23): DNP phosphoramidite base
  misc_feature (23)..(23): n is a, c, g, or t
  modified_base (44)..(44): DNP phosphoramidite base
  misc_feature (44)..(44): n is a, c, g, or t
  modified_base (65)..(65): DNP phosphoramidite base
  misc_feature (65)..(65): n is a, c, g, or t
  modified_base (86)..(86): DNP phosphoramidite base
  misc_feature (86)..(86): n is a, c, g, or t
tngctaattgtttgggtctacantatgagctgaaatataaattntcaaggaagtttaaatgtccnatgaaatcagacctagctttnt

SEQ ID NO: 1131 - DNA, 87 bp, Artificial Sequence
  Synthetic Probe
  modified_base (2)..(2): DNP phosphoramidite base
  misc_feature (2)..(2): n is a, c, g, or t
  modified_base (23)..(23): DNP phosphoramidite base
  misc_feature (23)..(23): n is a, c, g, or t
  modified_base (44)..(44): DNP phosphoramidite base
  misc_feature (44)..(44): n is a, c, g, or t
  modified_base (65)..(65): DNP phosphoramidite base
  misc_feature (65)..(65): n is a, c, g, or t
  modified_base (86)..(86): DNP phosphoramidite base
  misc_feature (86)..(86): n is a, c, g, or t
tntcaaaattttcacattgacanatgattgtctaataaatctantccttctacactaactaaaanacaaatttttttttgccaccnt

SEQ ID NO: 1132 - DNA, 87 bp, Artificial Sequence
  Synthetic Probe
  modified_base (2)..(2): DNP phosphoramidite base
  misc_feature (2)..(2): n is a, c, g, or t
  modified_base (23)..(23): DNP phosphoramidite base
  misc_feature (23)..(23): n is a, c, g, or t
  modified_base (44)..(44): DNP phosphoramidite base
  misc_feature (44)..(44): n is a, c, g, or t
  modified_base (65)..(65): DNP phosphoramidite base
  misc_feature (65)..(65): n is a, c, g, or t
  modified_base (86)..(86): DNP phosphoramidite base
  misc_feature (86)..(86): n is a, c, g, or t
tntcattgaagttttctttgtgntgtaaaaagttactgtgtaantgagaatcttaaacatagaancacaagggtgatgcatctgtnt

SEQ ID NO: 1133 - DNA, 87 bp, Artificial Sequence
  Synthetic Probe
  modified_base (2)..(2): DNP phosphoramidite base
  misc_feature (2)..(2): n is a, c, g, or t
  modified_base (23)..(23): DNP phosphoramidite base
  misc_feature (23)..(23): n is a, c, g, or t
  modified_base (44)..(44): DNP phosphoramidite base
  misc_feature (44)..(44): n is a, c, g, or t
  modified_base (65)..(65): DNP phosphoramidite base
  misc_feature (65)..(65): n is a, c, g, or t
  modified_base (86)..(86): DNP phosphoramidite base
  misc_feature (86)..(86): n is a, c, g, or t
tngtatccttcatggcaccaaantagagctttctgcttttcccntgccctaatccatccgatatnattattgttgaattcattttnt

SEQ ID NO: 1134 - DNA, 87 bp, Artificial Sequence
  Synthetic Probe
  modified_base (2)..(2): DNP phosphoramidite base
  misc_feature (2)..(2): n is a, c, g, or t
  modified_base (23)..(23): DNP phosphoramidite base
  misc_feature (23)..(23): n is a, c, g, or t
  modified_base (44)..(44): DNP phosphoramidite base
  misc_feature (44)..(44): n is a, c, g, or t
  modified_base (65)..(65): DNP phosphoramidite base
  misc_feature (65)..(65): n is a, c, g, or t
  modified_base (86)..(86): DNP phosphoramidite base
  misc_feature (86)..(86): n is a, c, g, or t
tntaagcacttacaacagtttcntagttgtttactgaattatantgttcctgctcacctggcatnagccttctataatctggcccnt

SEQ ID NO: 1135 - DNA, 87 bp, Artificial Sequence
  Synthetic Probe
  modified_base (2)..(2): DNP phosphoramidite base
  misc_feature (2)..(2): n is a, c, g, or t
  modified_base (23)..(23): DNP phosphoramidite base
  misc_feature (23)..(23): n is a, c, g, or t
  modified_base (44)..(44): DNP phosphoramidite base
  misc_feature (44)..(44): n is a, c, g, or t
  modified_base (65)..(65): DNP phosphoramidite base
  misc_feature (65)..(65): n is a, c, g, or t
  modified_base (86)..(86): DNP phosphoramidite base
  misc_feature (86)..(86): n is a, c, g, or t
tnccgtgcacagctgctccctcntgccctcgccccttccacctncacggcagttacagatgaagnctgttgtaatttctggaaggnt

SEQ ID NO: 1136 - DNA, 87 bp, Artificial Sequence
  Synthetic Probe
  modified_base (2)..(2): DNP phosphoramidite base
  misc_feature (2)..(2): n is a, c, g, or t
  modified_base (23)..(23): DNP phosphoramidite base
  misc_feature (23)..(23): n is a, c, g, or t
  modified_base (44)..(44): DNP phosphoramidite base
  misc_feature (44)..(44): n is a, c, g, or t
  modified_base (65)..(65): DNP phosphoramidite base
  misc_feature (65)..(65): n is a, c, g, or t
  modified_base (86)..(86): DNP phosphoramidite base
  misc_feature (86)..(86): n is a, c, g, or t
tncaagatgaccaaggtgaccanaaattttattgaattacagtntgtaagtggaaaaaatgactngacttcctgcatggagaagtnt

SEQ ID NO: 1137 - DNA, 87 bp, Artificial Sequence
  Synthetic Probe
  modified_base (2)..(2): DNP phosphoramidite base
  misc_feature (2)..(2): n is a, c, g, or t
  modified_base (23)..(23): DNP phosphoramidite base
  misc_feature (23)..(23): n is a, c, g, or t
  modified_base (44)..(44): DNP phosphoramidite base
  misc_feature (44)..(44): n is a, c, g, or t
  modified_base (65)..(65): DNP phosphoramidite base
  misc_feature (65)..(65): n is a, c, g, or t
  modified_base (86)..(86): DNP phosphoramidite base
  misc_feature (86)..(86): n is a, c, g, or t
tnattctaaaggcaaatccaacnagaccgttctgtttctctatntttgaaaacacggaaataacnttttttctaacttcccgtagnt

SEQ ID NO: 1138 - DNA, 87 bp, Artificial Sequence
  Synthetic Probe
  modified_base (2)..(2): DNP phosphoramidite base
  misc_feature (2)..(2): n is a, c, g, or t
  modified_base (23)..(23): DNP phosphoramidite base
  misc_feature (23)..(23): n is a, c, g, or t
  modified_base (44)..(44): DNP phosphoramidite base
  misc_feature (44)..(44): n is a, c, g, or t
  modified_base (65)..(65): DNP phosphoramidite base
  misc_feature (65)..(65): n is a, c, g, or t
  modified_base (86)..(86): DNP phosphoramidite base
  misc_feature (86)..(86): n is a, c, g, or t
tntttgaaaagaaattccagccntgttatataagttctactgcnaatatcaatatgtaaatgtanaccacttggttgtagtttcgnt

SEQ ID NO: 1139 - DNA, 87 bp, Artificial Sequence
  Synthetic Probe
  modified_base (2)..(2): DNP phosphoramidite base
  misc_feature (2)..(2): n is a, c, g, or t
  modified_base (23)..(23): DNP phosphoramidite base
  misc_feature (23)..(23): n is a, c, g, or t
  modified_base (44)..(44): DNP phosphoramidite base
  misc_feature (44)..(44): n is a, c, g, or t
  modified_base (65)..(65): DNP phosphoramidite base
  misc_feature (65)..(65): n is a, c, g, or t
  modified_base (86)..(86): DNP phosphoramidite base
  misc_feature (86)..(86): n is a, c, g, or t
tngtagaaaagatgatttttggnttgatataaattaagacttcnttccctgtcctttttgatttngtttggcttcgtcagtttgcnt

SEQ ID NO: 1140 - DNA, 87 bp, Artificial Sequence
  Synthetic Probe
  modified_base (2)..(2): DNP phosphoramidite base
  misc_feature (2)..(2): n is a, c, g, or t
  modified_base (23)..(23): DNP phosphoramidite base
  misc_feature (23)..(23): n is a, c, g, or t
  modified_base (44)..(44): DNP phosphoramidite base
  misc_feature (44)..(44): n is a, c, g, or t
  modified_base (65)..(65): DNP phosphoramidite base
  misc_feature (65)..(65): n is a, c, g, or t
  modified_base (86)..(86): DNP phosphoramidite base
  misc_feature (86)..(86): n is a, c, g, or t
tnttcccagaaattgaccaaacntttctgtctgcccctgaaatnctacttttcttcatacttgtnatttatctcttacagccattnt

SEQ ID NO: 1141 - DNA, 87 bp, Artificial Sequence
  Synthetic Probe
  modified_base (2)..(2): DNP phosphoramidite base
  misc_feature (2)..(2): n is a, c, g, or t
  modified_base (23)..(23): DNP phosphoramidite base
  misc_feature (23)..(23): n is a, c, g, or t
  modified_base (44)..(44): DNP phosphoramidite base
  misc_feature (44)..(44): n is a, c, g, or t
  modified_base (65)..(65): DNP phosphoramidite base
  misc_feature (65)..(65): n is a, c, g, or t
  modified_base (86)..(86): DNP phosphoramidite base
  misc_feature (86)..(86): n is a, c, g, or t
tncaaacaagaataatttgattnttatctatacaatggaagcanatgccttaattgcaaagaganaaacacatgtacacacacacnt

SEQ ID NO: 1142 - DNA, 87 bp, Artificial Sequence
  Synthetic Probe
  modified_base (2)..(2): DNP phosphoramidite base
  misc_feature (2)..(2): n is a, c, g, or t
  modified_base (23)..(23): DNP phosphoramidite base
  misc_feature (23)..(23): n is a, c, g, or t
  modified_base (44)..(44): DNP phosphoramidite base
  misc_feature (44)..(44): n is a, c, g, or t
  modified_base (65)..(65): DNP phosphoramidite base
  misc_feature (65)..(65): n is a, c, g, or t
  modified_base (86)..(86): DNP phosphoramidite base
  misc_feature (86)..(86): n is a, c, g, or t
tngaaaacatgatttcattttgntataaaacatttattttgtanaaagatagaatccctctttcncttccatctcataactccctnt

SEQ ID NO: 1143 - DNA, 87 bp, Artificial Sequence
  Synthetic Probe
  modified_base (2)..(2): DNP phosphoramidite base
  misc_feature (2)..(2): n is a, c, g, or t
  modified_base (23)..(23): DNP phosphoramidite base
  misc_feature (23)..(23): n is a, c, g, or t
  modified_base (44)..(44): DNP phosphoramidite base
  misc_feature (44)..(44): n is a, c, g, or t
  modified_base (65)..(65): DNP phosphoramidite base
  misc_feature (65)..(65): n is a, c, g, or t
  modified_base (86)..(86): DNP phosphoramidite base
  misc_feature (86)..(86): n is a, c, g, or t
tntgaataattttggcattattnccaaggcttttcatgactctnctcttttgaggtgagggaggntggtatgggtcacttatggcnt

SEQ ID NO: 1144 - DNA, 87 bp, Artificial Sequence
  Synthetic Probe
  modified_base (2)..(2): DNP phosphoramidite base
  misc_feature (2)..(2): n is a, c, g, or t
  modified_base (23)..(23): DNP phosphoramidite base
  misc_feature (23)..(23): n is a, c, g, or t
  modified_base (44)..(44): DNP phosphoramidite base
  misc_feature (44)..(44): n is a, c, g, or t
  modified_base (65)..(65): DNP phosphoramidite base
  misc_feature (65)..(65): n is a, c, g, or t
  modified_base (86)..(86): DNP phosphoramidite base
  misc_feature (86)..(86): n is a, c, g, or t
tnatctcttaccagataatgatnttaaataatcttgttttactnctctgagattatttagatggncttatttccattttgattttnt

SEQ ID NO: 1145 - DNA, 87 bp, Artificial Sequence
  Synthetic Probe
  modified_base (2)..(2): DNP phosphoramidite base
  misc_feature (2)..(2): n is a, c, g, or t
  modified_base (23)..(23): DNP phosphoramidite base
  misc_feature (23)..(23): n is a, c, g, or t
  modified_base (44)..(44): DNP phosphoramidite base
  misc_feature (44)..(44): n is a, c, g, or t
  modified_base (65)..(65): DNP phosphoramidite base
  misc_feature (65)..(65): n is a, c, g, or t
  modified_base (86)..(86): DNP phosphoramidite base
  misc_feature (86)..(86): n is a, c, g, or t
tntaaagtcaaaatatttgacanaattttattacaatcaatatnagtttaaataattttgaatcnatcctctacccattccctctnt

SEQ ID NO: 1146 - DNA, 87 bp, Artificial Sequence
  Synthetic Probe
  modified_base (2)..(2): DNP phosphoramidite base
  misc_feature (2)..(2): n is a, c, g, or t
  modified_base (23)..(23): DNP phosphoramidite base
  misc_feature (23)..(23): n is a, c, g, or t
  modified_base (44)..(44): DNP phosphoramidite base
  misc_feature (44)..(44): n is a, c, g, or t
  modified_base (65)..(65): DNP phosphoramidite base
  misc_feature (65)..(65): n is a, c, g, or t
  modified_base (86)..(86): DNP phosphoramidite base
  misc_feature (86)..(86): n is a, c, g, or t
tntcttctgttaaaattttaaanaataatcatgagtttatttgncttaataaatcccgtattatngtggacatttctttgctgatnt

SEQ ID NO: 1147 - DNA, 87 bp, Artificial Sequence
  Synthetic Probe
  modified_base (2)..(2): DNP phosphoramidite base
  misc_feature (2)..(2): n is a, c, g, or t
  modified_base (23)..(23): DNP phosphoramidite base
  misc_feature (23)..(23): n is a, c, g, or t
  modified_base (44)..(44): DNP phosphoramidite base
  misc_feature (44)..(44): n is a, c, g, or t
  modified_base (65)..(65): DNP phosphoramidite base
  misc_feature (65)..(65): n is a, c, g, or t
  modified_base (86)..(86): DNP phosphoramidite base
  misc_feature (86)..(86): n is a, c, g, or t
tntttgcattgttctccagcttnactattgtgatatttatttcnaggagctcttaacctagcttnttccaatttctagctattatnt

SEQ ID NO: 1148 - DNA, 87 bp, Artificial Sequence
  Synthetic Probe
  modified_base (2)..(2): DNP phosphoramidite base
  misc_feature (2)..(2): n is a, c, g, or t
  modified_base (23)..(23): DNP phosphoramidite base
  misc_feature (23)..(23): n is a, c, g, or t
  modified_base (44)..(44): DNP phosphoramidite base
  misc_feature (44)..(44): n is a, c, g, or t
  modified_base (65)..(65): DNP phosphoramidite base
  misc_feature (65)..(65): n is a, c, g, or t
  modified_base (86)..(86): DNP phosphoramidite base
  misc_feature (86)..(86): n is a, c, g, or t
tntcttatttatctttcagctanaataagaatatgcaaatacanaaaagaaaacaagaatatccnctgacatctcttatagtaaant

SEQ ID NO: 1149 - DNA, 87 bp, Artificial Sequence
  Synthetic Probe
  modified_base (2)..(2): DNP phosphoramidite base
  misc_feature (2)..(2): n is a, c, g, or t
  modified_base (23)..(23): DNP phosphoramidite base
  misc_feature (23)..(23): n is a, c, g, or t
  modified_base (44)..(44): DNP phosphoramidite base
  misc_feature (44)..(44): n is a, c, g, or t
  modified_base (65)..(65): DNP phosphoramidite base
  misc_feature (65)..(65): n is a, c, g, or t
  modified_base (86)..(86): DNP phosphoramidite base
  misc_feature (86)..(86): n is a, c, g, or t
tnttttctgcagctatctcacantaggagaaaaaggtaaagttnttataaaaataactatatatncaccttctcccatctctcccnt

SEQ ID NO: 1150 - DNA, 87 bp, Artificial Sequence
  Synthetic Probe
  modified_base (2)..(2): DNP phosphoramidite base
  misc_feature (2)..(2): n is a, c, g, or t
  modified_base (23)..(23): DNP phosphoramidite base
  misc_feature (23)..(23): n is a, c, g, or t
  modified_base (44)..(44): DNP phosphoramidite base
  misc_feature (44)..(44): n is a, c, g, or t
  modified_base (65)..(65): DNP phosphoramidite base
  misc_feature (65)..(65): n is a, c, g, or t
  modified_base (86)..(86): DNP phosphoramidite base
  misc_feature (86)..(86): n is a, c, g, or t
tnagataagagctgcccctgatnaatagagtgaggagtgaaggnctatagtggaaagagcaagcnattttcagaattcagtggtgnt

SEQ ID NO: 1151 - DNA, 87 bp, Artificial Sequence
  Synthetic Probe
  modified_base (2)..(2): DNP phosphoramidite base
  misc_feature (2)..(2): n is a, c, g, or t
  modified_base (23)..(23): DNP phosphoramidite base
  misc_feature (23)..(23): n is a, c, g, or t
  modified_base (44)..(44): DNP phosphoramidite base
  misc_feature (44)..(44): n is a, c, g, or t
  modified_base (65)..(65): DNP phosphoramidite base
  misc_feature (65)..(65): n is a, c, g, or t
  modified_base (86)..(86): DNP phosphoramidite base
  misc_feature (86)..(86): n is a, c, g, or t
tngtaaaagtctgagtatttctnagtggaccagaccggacactngcagtaggtggcctgtgtgangctttcttaaggcatcttcant

SEQ ID NO: 1152 - DNA, 87 bp, Artificial Sequence
  Synthetic Probe
  modified_base (2)..(2): DNP phosphoramidite base
  misc_feature (2)..(2): n is a, c, g, or t
  modified_base (23)..(23): DNP phosphoramidite base
  misc_feature (23)..(23): n is a, c, g, or t
  modified_base (44)..(44): DNP phosphoramidite base
  misc_feature (44)..(44): n is a, c, g, or t
  modified_base (65)..(65): DNP phosphoramidite base
  misc_feature (65)..(65): n is a, c, g, or t
  modified_base (86)..(86): DNP phosphoramidite base
  misc_feature (86)..(86): n is a, c, g, or t
tnttctagaggtctgtctgcctngacaagatgaccctaagaganaactggctctggggtgtagangccagaagcaggagctctggnt

SEQ ID NO: 1153 - DNA, 87 bp, Artificial Sequence
  Synthetic Probe
  modified_base (2)..(2): DNP phosphoramidite base
  misc_feature (2)..(2): n is a, c, g, or t
  modified_base (23)..(23): DNP phosphoramidite base
  misc_feature (23)..(23): n is a, c, g, or t
  modified_base (44)..(44): DNP phosphoramidite base
  misc_feature (44)..(44): n is a, c, g, or t
  modified_base (65)..(65): DNP phosphoramidite base
  misc_feature (65)..(65): n is a, c, g, or t
  modified_base (86)..(86): DNP phosphoramidite base
  misc_feature (86)..(86): n is a, c, g, or t
tngaacagttgtggggtcagctnggaggatgcttgcccacatcnaaggaattgtgtagtgggagnattctggcagggagtcttcant

SEQ ID NO: 1154 - DNA, 87 bp, Artificial Sequence
  Synthetic Probe
  modified_base (2)..(2): DNP phosphoramidite base
  misc_feature (2)..(2): n is a, c, g, or t
  modified_base (23)..(23): DNP phosphoramidite base
  misc_feature (23)..(23): n is a, c, g, or t
  modified_base (44)..(44): DNP phosphoramidite base
  misc_feature (44)..(44): n is a, c, g, or t
  modified_base (65)..(65): DNP phosphoramidite base
  misc_feature (65)..(65): n is a, c, g, or t
  modified_base (86)..(86): DNP phosphoramidite base
  misc_feature (86)..(86): n is a, c, g, or t
tntcctccctaccaaaagaatangtgtgtcccagaagaggctgnatccttcaacctaggtcccanaagtcaagagcacatgaagcnt

SEQ ID NO: 1155 - DNA, 87 bp, Artificial Sequence
  Synthetic Probe
  modified_base (2)..(2): DNP phosphoramidite base
  misc_feature (2)..(2): n is a, c, g, or t
  modified_base (23)..(23): DNP phosphoramidite base
  misc_feature (23)..(23): n is a, c, g, or t
  modified_base (44)..(44): DNP phosphoramidite base
  misc_feature (44)..(44): n is a, c, g, or t
  modified_base (65)..(65): DNP phosphoramidite base
  misc_feature (65)..(65): n is a, c, g, or t
  modified_base (86)..(86): DNP phosphoramidite base
  misc_feature (86)..(86): n is a, c, g, or t
tngagccttgaggaaagcccacnagcagaaaagcagaggggggnaaaagatgcctccccagaatngggcttcctatttgctctttnt

SEQ ID NO: 1156 - DNA, 87 bp, Artificial Sequence
  Synthetic Probe
  modified_base (2)..(2): DNP phosphoramidite base
  misc_feature (2)..(2): n is a, c, g, or t
  modified_base (23)..(23): DNP phosphoramidite base
  misc_feature (23)..(23): n is a, c, g, or t
  modified_base (44)..(44): DNP phosphoramidite base
  misc_feature (44)..(44): n is a, c, g, or t
  modified_base (65)..(65): DNP phosphoramidite base
  misc_feature (65)..(65): n is a, c, g, or t
  modified_base (86)..(86): DNP phosphoramidite base
  misc_feature (86)..(86): n is a, c, g, or t
tnatttagagaacaacttttccnatatgcatagctttctactgnccattaaaaaaaagtcaatcncaagaaaaaggcaagacctcnt

SEQ ID NO: 1157 - DNA, 87 bp, Artificial Sequence
  Synthetic Probe
  modified_base (2)..(2): DNP phosphoramidite base
  misc_feature (2)..(2): n is a, c, g, or t
  modified_base (23)..(23): DNP phosphoramidite base
  misc_feature (23)..(23): n is a, c, g, or t
  modified_base (44)..(44): DNP phosphoramidite base
  misc_feature (44)..(44): n is a, c, g, or t
  modified_base (65)..(65): DNP phosphoramidite base
  misc_feature (65)..(65): n is a, c, g, or t
  modified_base (86)..(86): DNP phosphoramidite base
  misc_feature (86)..(86): n is a, c, g, or t
tntatacctagcaccttctcacnattttttccctgggggcagangggaaactgtggtgtaaagangaagtctacatagtttttttnt

SEQ ID NO: 1158 - DNA, 87 bp, Artificial Sequence
  Synthetic Probe
  modified_base (2)..(2): DNP phosphoramidite base
  misc_feature (2)..(2): n is a, c, g, or t
  modified_base (23)..(23): DNP phosphoramidite base
  misc_feature (23)..(23): n is a, c, g, or t
  modified_base (44)..(44): DNP phosphoramidite base
  misc_feature (44)..(44): n is a, c, g, or t
  modified_base (65)..(65): DNP phosphoramidite base
  misc_feature (65)..(65): n is a, c, g, or t
  modified_base (86)..(86): DNP phosphoramidite base
  misc_feature (86)..(86): n is a, c, g, or t
tnctaaaacaccataggcatttnttcaatggttttcatcaaaantagagaatgtggacacattanttagaaaagcagaaggaagtnt

SEQ ID NO: 1159 - DNA, 87 bp, Artificial Sequence
  Synthetic Probe
  modified_base (2)..(2): DNP phosphoramidite base
  misc_feature (2)..(2): n is a, c, g, or t
  modified_base (23)..(23): DNP phosphoramidite base
  misc_feature (23)..(23): n is a, c, g, or t
  modified_base (44)..(44): DNP phosphoramidite base
  misc_feature (44)..(44): n is a, c, g, or t
  modified_base (65)..(65): DNP phosphoramidite base
  misc_feature (65)..(65): n is a, c, g, or t
  modified_base (86)..(86): DNP phosphoramidite base
  misc_feature (86)..(86): n is a, c, g, or t
tnaggggtgctggggagggaaanagtacctaaactttcccttcncctgggaaatgtgcttttggntcaagataagcagatctatcnt

SEQ ID NO: 1160 - DNA, 87 bp, Artificial Sequence
  Synthetic Probe
  modified_base (2)..(2): DNP phosphoramidite base
  misc_feature (2)..(2): n is a, c, g, or t
  modified_base (23)..(23): DNP phosphoramidite base
  misc_feature (23)..(23): n is a, c, g, or t
  modified_base (44)..(44): DNP phosphoramidite base
  misc_feature (44)..(44): n is a, c, g, or t
  modified_base (65)..(65): DNP phosphoramidite base
  misc_feature (65)..(65): n is a, c, g, or t
  modified_base (86)..(86): DNP phosphoramidite base
  misc_feature (86)..(86): n is a, c, g, or t
tntgtgatcgctgctcttgcctngcctttgtgatactatagcanaaggccagtgctgggttaganaatgggattttaggctgctant

SEQ ID NO: 1161 - DNA, 87 bp, Artificial Sequence
  Synthetic Probe
  modified_base (2)..(2): DNP phosphoramidite base
  misc_feature (2)..(2): n is a, c, g, or t
  modified_base (23)..(23): DNP phosphoramidite base
  misc_feature (23)..(23): n is a, c, g, or t
  modified_base (44)..(44): DNP phosphoramidite base
  misc_feature (44)..(44): n is a, c, g, or t
  modified_base (65)..(65): DNP phosphoramidite base
  misc_feature (65)..(65): n is a, c, g, or t
  modified_base (86)..(86): DNP phosphoramidite base
  misc_feature (86)..(86): n is a, c, g, or t
tnattaaaaatagaaaatgaagnaagaaaaatatcttccccatngttttcagccaagtagagatntcattcatttggattcacagnt

SEQ ID NO: 1162 - DNA, 87 bp, Artificial Sequence
  Synthetic Probe
  modified_base (2)..(2): DNP phosphoramidite base
  misc_feature (2)..(2): n is a, c, g, or t
  modified_base (23)..(23): DNP phosphoramidite base
  misc_feature (23)..(23): n is a, c, g, or t
  modified_base (44)..(44): DNP phosphoramidite base
  misc_feature (44)..(44): n is a, c, g, or t
  modified_base (65)..(65): DNP phosphoramidite base
  misc_feature (65)..(65): n is a, c, g, or t
  modified_base (86)..(86): DNP phosphoramidite base
  misc_feature (86)..(86): n is a, c, g, or t
tncacaaacatcccttgagatcngttaactggaagagttcattnacatttcatgtaaagttttgntaattagctaatcaaaatacnt

SEQ ID NO: 1163 - DNA, 87 bp, Artificial Sequence
  Synthetic Probe
  modified_base (2)..(2): DNP phosphoramidite base
  misc_feature (2)..(2): n is a, c, g, or t
  modified_base (23)..(23): DNP phosphoramidite base
  misc_feature (23)..(23): n is a, c, g, or t
  modified_base (44)..(44): DNP phosphoramidite base
  misc_feature (44)..(44): n is a, c, g, or t
  modified_base (65)..(65): DNP phosphoramidite base
  misc_feature (65)..(65): n is a, c, g, or t
  modified_base (86)..(86): DNP phosphoramidite base
  misc_feature (86)..(86): n is a, c, g, or t
tngatgaaagccttttgtaatgntgacttaagactgggaagaantataaacactctcttttagtnattaacaaagagagtattgant

SEQ ID NO: 1164 - DNA, 87 bp, Artificial Sequence
  Synthetic Probe
  modified_base (2)..(2): DNP phosphoramidite base
  misc_feature (2)..(2): n is a, c, g, or t
  modified_base (23)..(23): DNP phosphoramidite base
  misc_feature (23)..(23): n is a, c, g, or t
  modified_base (44)..(44): DNP phosphoramidite base
  misc_feature (44)..(44): n is a, c, g, or t
  modified_base (65)..(65): DNP phosphoramidite base
  misc_feature (65)..(65): n is a, c, g, or t
  modified_base (86)..(86): DNP phosphoramidite base
  misc_feature (86)..(86): n is a, c, g, or t
tnttccttccagcagtggaaccnagaaagaatgtctggctcctnaggctggtggctggacagcangaggaggtgagtgaagagctnt

SEQ ID NO: 1165 - DNA, 87 bp, Artificial Sequence
  Synthetic Probe
  modified_base (2)..(2): DNP phosphoramidite base
  misc_feature (2)..(2): n is a, c, g, or t
  modified_base (23)..(23): DNP phosphoramidite base
  misc_feature (23)..(23): n is a, c, g, or t
  modified_base (44)..(44): DNP phosphoramidite base
  misc_feature (44)..(44): n is a, c, g, or t
  modified_base (65)..(65): DNP phosphoramidite base
  misc_feature (65)..(65): n is a, c, g, or t
  modified_base (86)..(86): DNP phosphoramidite base
  misc_feature (86)..(86): n is a, c, g, or t
tntctttttttctttactttctntgtctgttcaggaccattgtntaataccatagcaaacctatntagtgtgttataaagttaccnt

SEQ ID NO: 1166 - DNA, 87 bp, Artificial Sequence
  Synthetic Probe
  modified_base (2)..(2): DNP phosphoramidite base
  misc_feature (2)..(2): n is a, c, g, or t
  modified_base (23)..(23): DNP phosphoramidite base
  misc_feature (23)..(23): n is a, c, g, or t
  modified_base (44)..(44): DNP phosphoramidite base
  misc_feature (44)..(44): n is a, c, g, or t
  modified_base (65)..(65): DNP phosphoramidite base
  misc_feature (65)..(65): n is a, c, g, or t
  modified_base (86)..(86): DNP phosphoramidite base
  misc_feature (86)..(86): n is a, c, g, or t
tnagctgtgaccaaacatacttnttatttgcttctttatagatnctaggttacattattgaaatnggatagatctcttactattcnt

SEQ ID NO: 1167 - DNA, 87 bp, Artificial Sequence
  Synthetic Probe
  modified_base (2)..(2): DNP phosphoramidite base
  misc_feature (2)..(2): n is a, c, g, or t
  modified_base (23)..(23): DNP phosphoramidite base
  misc_feature (23)..(23): n is a, c, g, or t
  modified_base (44)..(44): DNP phosphoramidite base
  misc_feature (44)..(44): n is a, c, g, or t
  modified_base (65)..(65): DNP phosphoramidite base
  misc_feature (65)..(65): n is a, c, g, or t
  modified_base (86)..(86): DNP phosphoramidite base
  misc_feature (86)..(86): n is a, c, g, or t
tntgatggcaaacatgtatgaantcttaccaatcatatttctanttgttgaaaaaccctatatantgataccaggtatttatcttnt

SEQ ID NO: 1168 - DNA, 87 bp, Artificial Sequence
  Synthetic Probe
  modified_base (2)..(2): DNP phosphoramidite base
  misc_feature (2)..(2): n is a, c, g, or t
  modified_base (23)..(23): DNP phosphoramidite base
  misc_feature (23)..(23): n is a, c, g, or t
  modified_base (44)..(44): DNP phosphoramidite base
  misc_feature (44)..(44): n is a, c, g, or t
  modified_base (65)..(65): DNP phosphoramidite base
  misc_feature (65)..(65): n is a, c, g, or t
  modified_base (86)..(86): DNP phosphoramidite base
  misc_feature (86)..(86): n is a, c, g, or t
tnacaaaaatgtctattttgaanaattgctttttactactgccnaactttatatattttgcagcnatgaaacaaaataattctaant

SEQ ID NO: 1169 - DNA, 87 bp, Artificial Sequence
  Synthetic Probe
  modified_base (2)..(2): DNP phosphoramidite base
  misc_feature (2)..(2): n is a, c, g, or t
  modified_base (23)..(23): DNP phosphoramidite base
  misc_feature (23)..(23): n is a, c, g, or t
  modified_base (44)..(44): DNP phosphoramidite base
  misc_feature (44)..(44): n is a, c, g, or t
  modified_base (65)..(65): DNP phosphoramidite base
  misc_feature (65)..(65): n is a, c, g, or t
  modified_base (86)..(86): DNP phosphoramidite base
  misc_feature (86)..(86): n is a, c, g, or t
tnctagcttgcataaacagcagnttgcatttttttttcaatgcntgaacttaataaaagctgagnacagaggataagatatgtaant

SEQ ID NO: 1170 - DNA, 87 bp, Artificial Sequence
  Synthetic Probe
  modified_base (2)..(2): DNP phosphoramidite base
  misc_feature (2)..(2): n is a, c, g, or t
  modified_base (23)..(23): DNP phosphoramidite base
  misc_feature (23)..(23): n is a, c, g, or t
  modified_base (44)..(44): DNP phosphoramidite base
  misc_feature (44)..(44): n is a, c, g, or t
  modified_base (65)..(65): DNP phosphoramidite base
  misc_feature (65)..(65): n is a, c, g, or t
  modified_base (86)..(86): DNP phosphoramidite base
  misc_feature (86)..(86): n is a, c, g, or t
tncattttgtaatgactgctganaattccataacctgagtgctngacagggctggtgaagaaagntagagaggatccagcatcacnt

SEQ ID NO: 1171 - DNA, 87 bp, Artificial Sequence
  Synthetic Probe
  modified_base (2)..(2): DNP phosphoramidite base
  misc_feature (2)..(2): n is a, c, g, or t
  modified_base (23)..(23): DNP phosphoramidite base
  misc_feature (23)..(23): n is a, c, g, or t
  modified_base (44)..(44): DNP phosphoramidite base
  misc_feature (44)..(44): n is a, c, g, or t
  modified_base (65)..(65): DNP phosphoramidite base
  misc_feature (65)..(65): n is a, c, g, or t
  modified_base (86)..(86): DNP phosphoramidite base
  misc_feature (86)..(86): n is a, c, g, or t
tnctgcacacggtgcaggacagnttttaaatctggggaggagancagtcccatctcaggctttcncagaggctagagggcgtggtnt

SEQ ID NO: 1172 - DNA, 87 bp, Artificial Sequence
  Synthetic Probe
  modified_base (2)..(2): DNP phosphoramidite base
  misc_feature (2)..(2): n is a, c, g, or t
  modified_base (23)..(23): DNP phosphoramidite base
  misc_feature (23)..(23): n is a, c, g, or t
  modified_base (44)..(44): DNP phosphoramidite base
  misc_feature (44)..(44): n is a, c, g, or t
  modified_base (65)..(65): DNP phosphoramidite base
  misc_feature (65)..(65): n is a, c, g, or t
  modified_base (86)..(86): DNP phosphoramidite base
  misc_feature (86)..(86): n is a, c, g, or t
tncctcatcatcaaccctcttgnaactgttttgttttaagatanaatgctgaacaagtggaacanaatattttactctcttttagnt

SEQ ID NO: 1173 - DNA, 87 bp, Artificial Sequence
  Synthetic Probe
  modified_base (2)..(2): DNP phosphoramidite base
  misc_feature (2)..(2): n is a, c, g, or t
  modified_base (23)..(23): DNP phosphoramidite base
  misc_feature (23)..(23): n is a, c, g, or t
  modified_base (44)..(44): DNP phosphoramidite base
  misc_feature (44)..(44): n is a, c, g, or t
  modified_base (65)..(65): DNP phosphoramidite base
  misc_feature (65)..(65): n is a, c, g, or t
  modified_base (86)..(86): DNP phosphoramidite base
  misc_feature (86)..(86): n is a, c, g, or t
tnactagataggtattttacttnctaggatatattatcttcaanacatgagagatgttggagatnagtattgaagagagatatcant

SEQ ID NO: 1174 - DNA, 87 bp, Artificial Sequence
  Synthetic Probe
  modified_base (2)..(2): DNP phosphoramidite base
  misc_feature (2)..(2): n is a, c, g, or t
  modified_base (23)..(23): DNP phosphoramidite base
  misc_feature (23)..(23): n is a, c, g, or t
  modified_base (44)..(44): DNP phosphoramidite base
  misc_feature (44)..(44): n is a, c, g, or t
  modified_base (65)..(65): DNP phosphoramidite base
  misc_feature (65)..(65): n is a, c, g, or t
  modified_base (86)..(86): DNP phosphoramidite base
  misc_feature (86)..(86): n is a, c, g, or t
tntaatttgctgtatataaattnatttggcatttaaatgctacnattgatttaaatggataactngtgtattataaactcacaaant

SEQ ID NO: 1175 - DNA, 87 bp, Artificial Sequence
  Synthetic Probe
  modified_base (2)..(2): DNP phosphoramidite base
  misc_feature (2)..(2): n is a, c, g, or t
  modified_base (23)..(23): DNP phosphoramidite base
  misc_feature (23)..(23): n is a, c, g, or t
  modified_base (44)..(44): DNP phosphoramidite base
  misc_feature (44)..(44): n is a, c, g, or t
  modified_base (65)..(65): DNP phosphoramidite base
  misc_feature (65)..(65): n is a, c, g, or t
  modified_base (86)..(86): DNP phosphoramidite base
  misc_feature (86)..(86): n is a, c, g, or t
tnattattagaaaacatctcaantattttatactcttcagctanctagtcaaagacatcataaanaacatagattggaagaagaant

SEQ ID NO: 1176 - DNA, 87 bp, Artificial Sequence
  Synthetic Probe
  modified_base (2)..(2): DNP phosphoramidite base
  misc_feature (2)..(2): n is a, c, g, or t
  modified_base (23)..(23): DNP phosphoramidite base
  misc_feature (23)..(23): n is a, c, g, or t
  modified_base (44)..(44): DNP phosphoramidite base
  misc_feature (44)..(44): n is a, c, g, or t
  modified_base (65)..(65): DNP phosphoramidite base
  misc_feature (65)..(65): n is a, c, g, or t
  modified_base (86)..(86): DNP phosphoramidite base
  misc_feature (86)..(86): n is a, c, g, or t
tntcccaaagtggagcgcaaaantttttactttttcaacataanaagttagtttaaaatactttnttctgaagaaaaaaagaaagnt

SEQ ID NO: 1177 - DNA, 87 bp, Artificial Sequence
  Synthetic Probe
  modified_base (2)..(2): DNP phosphoramidite base
  misc_feature (2)..(2): n is a, c, g, or t
  modified_base (23)..(23): DNP phosphoramidite base
  misc_feature (23)..(23): n is a, c, g, or t
  modified_base (44)..(44): DNP phosphoramidite base
  misc_feature (44)..(44): n is a, c, g, or t
  modified_base (65)..(65): DNP phosphoramidite base
  misc_feature (65)..(65): n is a, c, g, or t
  modified_base (86)..(86): DNP phosphoramidite base
  misc_feature (86)..(86): n is a, c, g, or t
tngtcccgcccccatgcttcttnccagccttcctccttcttctncccactgcctccgcccattcncctcgcccacccgggaagctnt

SEQ ID NO: 1178 - DNA, 87 bp, Artificial Sequence
  Synthetic Probe
  modified_base (2)..(2): DNP phosphoramidite base
  misc_feature (2)..(2): n is a, c, g, or t
  modified_base (23)..(23): DNP phosphoramidite base
  misc_feature (23)..(23): n is a, c, g, or t
  modified_base (44)..(44): DNP phosphoramidite base
  misc_feature (44)..(44): n is a, c, g, or t
  modified_base (65)..(65): DNP phosphoramidite base
  misc_feature (65)..(65): n is a, c, g, or t
  modified_base (86)..(86): DNP phosphoramidite base
  misc_feature (86)..(86): n is a, c, g, or t
tncctctttcccgcccccatggnctgccttcgattggctaaacnctgctgggccgcggcggggantgcggcgcagccgcattctgnt

SEQ ID NO: 1179 - DNA, 87 bp, Artificial Sequence
  Synthetic Probe
  modified_base (2)..(2): DNP phosphoramidite base
  misc_feature (2)..(2): n is a, c, g, or t
  modified_base (23)..(23): DNP phosphoramidite base
  misc_feature (23)..(23): n is a, c, g, or t
  modified_base (44)..(44): DNP phosphoramidite base
  misc_feature (44)..(44): n is a, c, g, or t
  modified_base (65)..(65): DNP phosphoramidite base
  misc_feature (65)..(65): n is a, c, g, or t
  modified_base (86)..(86): DNP phosphoramidite base
  misc_feature (86)..(86): n is a, c, g, or t
tnattggctagacttaggcctgngaccctagtgattggctgatnaggaggagccagcaagtgtgngctgagctccggggtgtgtgnt

SEQ ID NO: 1180 - DNA, 87 bp, Artificial Sequence
  Synthetic Probe
  modified_base (2)..(2): DNP phosphoramidite base
  misc_feature (2)..(2): n is a, c, g, or t
  modified_base (23)..(23): DNP phosphoramidite base
  misc_feature (23)..(23): n is a, c, g, or t
  modified_base (44)..(44): DNP phosphoramidite base
  misc_feature (44)..(44): n is a, c, g, or t
  modified_base (65)..(65): DNP phosphoramidite base
  misc_feature (65)..(65): n is a, c, g, or t
  modified_base (86)..(86): DNP phosphoramidite base
  misc_feature (86)..(86): n is a, c, g, or t
tnaagttaagggagtcaggggcntatcgctcctcgagactcgcnagtcgcggccactgcagtcancttcgccagttagcccttagnt

SEQ ID NO: 1181 - DNA, 87 bp, Artificial Sequence
  Synthetic Probe
  modified_base (2)..(2): DNP phosphoramidite base
  misc_feature (2)..(2): n is a, c, g, or t
  modified_base (23)..(23): DNP phosphoramidite base
  misc_feature (23)..(23): n is a, c, g, or t
  modified_base (44)..(44): DNP phosphoramidite base
  misc_feature (44)..(44): n is a, c, g, or t
  modified_base (65)..(65): DNP phosphoramidite base
  misc_feature (65)..(65): n is a, c, g, or t
  modified_base (86)..(86): DNP phosphoramidite base
  misc_feature (86)..(86): n is a, c, g, or t
tntaagatttttccttcatgttnccccaagaaaatcacatcacnccctaaacttggaaggagaanaaacattaaaatcctcaaaant

SEQ ID NO: 1182 - DNA, 87 bp, Artificial Sequence
  Synthetic Probe
  modified_base (2)..(2): DNP phosphoramidite base
  misc_feature (2)..(2): n is a, c, g, or t
  modified_base (23)..(23): DNP phosphoramidite base
  misc_feature (23)..(23): n is a, c, g, or t
  modified_base (44)..(44): DNP phosphoramidite base
  misc_feature (44)..(44): n is a, c, g, or t
  modified_base (65)..(65): DNP phosphoramidite base
  misc_feature (65)..(65): n is a, c, g, or t
  modified_base (86)..(86): DNP phosphoramidite base
  misc_feature (86)..(86): n is a, c, g, or t
tnttcttgaggatttttataganctagaaattgcatcctaggtntttaaacatccagaactctgntggttctattaagcctcctgnt

SEQ ID NO: 1183 - DNA, 87 bp, Artificial Sequence
  Synthetic Probe
  modified_base (2)..(2): DNP phosphoramidite base
  misc_feature (2)..(2): n is a, c, g, or t
  modified_base (23)..(23): DNP phosphoramidite base
  misc_feature (23)..(23): n is a, c, g, or t
  modified_base (44)..(44): DNP phosphoramidite base
  misc_feature (44)..(44): n is a, c, g, or t
  modified_base (65)..(65): DNP phosphoramidite base
  misc_feature (65)..(65): n is a, c, g, or t
  modified_base (86)..(86): DNP phosphoramidite base
  misc_feature (86)..(86): n is a, c, g, or t
tntgtaaagccattcatgtaaanttaaatttatgcagaaattcntgattcaaaacaaaatataantaaaatacattaattggggant

SEQ ID NO: 1184 - DNA, 87 bp, Artificial Sequence
  Synthetic Probe
  modified_base (2)..(2): DNP phosphoramidite base
  misc_feature (2)..(2): n is a, c, g, or t
  modified_base (23)..(23): DNP phosphoramidite base
  misc_feature (23)..(23): n is a, c, g, or t
  modified_base (44)..(44): DNP phosphoramidite base
  misc_feature (44)..(44): n is a, c, g, or t
  modified_base (65)..(65): DNP phosphoramidite base
  misc_feature (65)..(65): n is a, c, g, or t
  modified_base (86)..(86): DNP phosphoramidite base
  misc_feature (86)..(86): n is a, c, g, or t
tngtttccaagaaagaattgagnatgttgaacaagggctggaanatttctggaccaaagtctctntgtgaaatacatttggtacant

SEQ ID NO: 1185 - DNA, 87 bp, Artificial Sequence
  Synthetic Probe
  modified_base (2)..(2): DNP phosphoramidite base
  misc_feature (2)..(2): n is a, c, g, or t
  modified_base (23)..(23): DNP phosphoramidite base
  misc_feature (23)..(23): n is a, c, g, or t
  modified_base (44)..(44): DNP phosphoramidite base
  misc_feature (44)..(44): n is a, c, g, or t
  modified_base (65)..(65): DNP phosphoramidite base
  misc_feature (65)..(65): n is a, c, g, or t
  modified_base (86)..(86): DNP phosphoramidite base
  misc_feature (86)..(86): n is a, c, g, or t
tntagacaaaaaggtcccagaanagcaagcataatggtcataanattatcagtatcttattgttnactaacttacagtattctttnt

SEQ ID NO: 1186 - DNA, 87 bp, Artificial Sequence
  Synthetic Probe
  modified_base (2)..(2): DNP phosphoramidite base
  misc_feature (2)..(2): n is a, c, g, or t
  modified_base (23)..(23): DNP phosphoramidite base
  misc_feature (23)..(23): n is a, c, g, or t
  modified_base (44)..(44): DNP phosphoramidite base
  misc_feature (44)..(44): n is a, c, g, or t
  modified_base (65)..(65): DNP phosphoramidite base
  misc_feature (65)..(65): n is a, c, g, or t
  modified_base (86)..(86): DNP phosphoramidite base
  misc_feature (86)..(86): n is a, c, g, or t
tntatgaataccaactataagtngggagaatttggtggtctaanaattcatacttaggatttggnattaccatatttactctttant

SEQ ID NO: 1187 - DNA, 87 bp, Artificial Sequence
  Synthetic Probe
  modified_base (2)..(2): DNP phosphoramidite base
  misc_feature (2)..(2): n is a, c, g, or t
  modified_base (23)..(23): DNP phosphoramidite base
  misc_feature (23)..(23): n is a, c, g, or t
  modified_base (44)..(44): DNP phosphoramidite base
  misc_feature (44)..(44): n is a, c, g, or t
  modified_base (65)..(65): DNP phosphoramidite base
  misc_feature (65)..(65): n is a, c, g, or t
  modified_base (86)..(86): DNP phosphoramidite base
  misc_feature (86)..(86): n is a, c, g, or t
tngatttaataatatgtttatanagaatcctggtttcctcatantgtggaaaagtcaggagcaanttttattattaaagaattttnt

SEQ ID NO: 1188 - DNA, 87 bp, Artificial Sequence
  Synthetic Probe
  modified_base (2)..(2): DNP phosphoramidite base
  misc_feature (2)..(2): n is a, c, g, or t
  modified_base (23)..(23): DNP phosphoramidite base
  misc_feature (23)..(23): n is a, c, g, or t
  modified_base (44)..(44): DNP phosphoramidite base
  misc_feature (44)..(44): n is a, c, g, or t
  modified_base (65)..(65): DNP phosphoramidite base
  misc_feature (65)..(65): n is a, c, g, or t
  modified_base (86)..(86): DNP phosphoramidite base
  misc_feature (86)..(86): n is a, c, g, or t
tnttttatttttatgagatattnatgaaagatgatttcccatgngtattttattctgttcttaantgttttatatctttgttaatnt

SEQ ID NO: 1189 - DNA, 87 bp, Artificial Sequence
  Synthetic Probe
  modified_base (2)..(2): DNP phosphoramidite base
  misc_feature (2)..(2): n is a, c, g, or t
  modified_base (23)..(23): DNP phosphoramidite base
  misc_feature (23)..(23): n is a, c, g, or t
  modified_base (44)..(44): DNP phosphoramidite base
  misc_feature (44)..(44): n is a, c, g, or t
  modified_base (65)..(65): DNP phosphoramidite base
  misc_feature (65)..(65): n is a, c, g, or t
  modified_base (86)..(86): DNP phosphoramidite base
  misc_feature (86)..(86): n is a, c, g, or t
tngctagattttatctggagatnaaatcaactttttaattcttnaataacttgcatttctttttncccctcttctcaagtggaatnt

SEQ ID NO: 1190 - DNA, 87 bp, Artificial Sequence
  Synthetic Probe
  modified_base (2)..(2): DNP phosphoramidite base
  misc_feature (2)..(2): n is a, c, g, or t
  modified_base (23)..(23): DNP phosphoramidite base
  misc_feature (23)..(23): n is a, c, g, or t
  modified_base (44)..(44): DNP phosphoramidite base
  misc_feature (44)..(44): n is a, c, g, or t
  modified_base (65)..(65): DNP phosphoramidite base
  misc_feature (65)..(65): n is a, c, g, or t
  modified_base (86)..(86): DNP phosphoramidite base
  misc_feature (86)..(86): n is a, c, g, or t
tntttcctcttgaagtatgtacngatactaatgaatatataacntctgggagaagacatacgccnaattattgcttgttccgaagnt

SEQ ID NO: 1191 - DNA, 87 bp, Artificial Sequence
  Synthetic Probe
  modified_base (2)..(2): DNP phosphoramidite base
  misc_feature (2)..(2): n is a, c, g, or t
  modified_base (23)..(23): DNP phosphoramidite base
  misc_feature (23)..(23): n is a, c, g, or t
  modified_base (44)..(44): DNP phosphoramidite base
  misc_feature (44)..(44): n is a, c, g, or t
  modified_base (65)..(65): DNP phosphoramidite base
  misc_feature (65)..(65): n is a, c, g, or t
  modified_base (86)..(86): DNP phosphoramidite base
  misc_feature (86)..(86): n is a, c, g, or t
tngctattcatcttttagtattntcttgttagaactgatgatancaccagaaggtatgagggaanataaaataacactcaaattcnt

SEQ ID NO: 1192 - DNA, 87 bp, Artificial Sequence
  Synthetic Probe
  modified_base (2)..(2): DNP phosphoramidite base
  misc_feature (2)..(2): n is a, c, g, or t
  modified_base (23)..(23): DNP phosphoramidite base
  misc_feature (23)..(23): n is a, c, g, or t
  modified_base (44)..(44): DNP phosphoramidite base
  misc_feature (44)..(44): n is a, c, g, or t
  modified_base (65)..(65): DNP phosphoramidite base
  misc_feature (65)..(65): n is a, c, g, or t
  modified_base (86)..(86): DNP phosphoramidite base
  misc_feature (86)..(86): n is a, c, g, or t
tncttccaatatcatagaaaacntggaaattggctgtaaattcnattctccttcaaatttagtcnagtcatcaaatcctgcctgtnt

SEQ ID NO: 1193 - DNA, 87 bp, Artificial Sequence
  Synthetic Probe
  modified_base (2)..(2): DNP phosphoramidite base
  misc_feature (2)..(2): n is a, c, g, or t
  modified_base (23)..(23): DNP phosphoramidite base
  misc_feature (23)..(23): n is a, c, g, or t
  modified_base (44)..(44): DNP phosphoramidite base
  misc_feature (44)..(44): n is a, c, g, or t
  modified_base (65)..(65): DNP phosphoramidite base
  misc_feature (65)..(65): n is a, c, g, or t
  modified_base (86)..(86): DNP phosphoramidite base
  misc_feature (86)..(86): n is a, c, g, or t
tngatgattttagatgccatganggatgcacataatgaaataanaatgatgagtagcactattanaagcatatcagtttctgaatnt

SEQ ID NO: 1194 - DNA, 87 bp, Artificial Sequence
  Synthetic Probe
  modified_base (2)..(2): DNP phosphoramidite base
  misc_feature (2)..(2): n is a, c, g, or t
  modified_base (23)..(23): DNP phosphoramidite base
  misc_feature (23)..(23): n is a, c, g, or t
  modified_base (44)..(44): DNP phosphoramidite base
  misc_feature (44)..(44): n is a, c, g, or t
  modified_base (65)..(65): DNP phosphoramidite base
  misc_feature (65)..(65): n is a, c, g, or t
  modified_base (86)..(86): DNP phosphoramidite base
  misc_feature (86)..(86): n is a, c, g, or t
tntagtatataatgtatatttanaaactgatgcatggctttatnttatgtgttgaaggatagttncagttcattctacctgaaaant

SEQ ID NO: 1195 - DNA, 87 bp, Artificial Sequence
  Synthetic Probe
  modified_base (2)..(2): DNP phosphoramidite base
  misc_feature (2)..(2): n is a, c, g, or t
  modified_base (23)..(23): DNP phosphoramidite base
  misc_feature (23)..(23): n is a, c, g, or t
  modified_base (44)..(44): DNP phosphoramidite base
  misc_feature (44)..(44): n is a, c, g, or t
  modified_base (65)..(65): DNP phosphoramidite base
  misc_feature (65)..(65): n is a, c, g, or t
  modified_base (86)..(86): DNP phosphoramidite base
  misc_feature (86)..(86): n is a, c, g, or t
tntgcagtgcagagaactcttcncaagaaatgaatattgaattnggttcctccatatatgattgncatcaaaagtaagtaattatnt

SEQ ID NO: 1196 - DNA, 87 bp, Artificial Sequence
  Synthetic Probe
  modified_base (2)..(2): DNP phosphoramidite base
  misc_feature (2)..(2): n is a, c, g, or t
  modified_base (23)..(23): DNP phosphoramidite base
  misc_feature (23)..(23): n is a, c, g, or t
  modified_base (44)..(44): DNP phosphoramidite base
  misc_feature (44)..(44): n is a, c, g, or t
  modified_base (65)..(65): DNP phosphoramidite base
  misc_feature (65)..(65): n is a, c, g, or t
  modified_base (86)..(86): DNP phosphoramidite base
  misc_feature (86)..(86): n is a, c, g, or t
tnattctatttaatagttaccanatctttcttacctacaaaaancccatgtttaccctatccccnagtaccttctacccacccatnt

SEQ ID NO: 1197 - DNA, 87 bp, Artificial Sequence
  Synthetic Probe
  modified_base (2)..(2): DNP phosphoramidite base
  misc_feature (2)..(2): n is a, c, g, or t
  modified_base (23)..(23): DNP phosphoramidite base
  misc_feature (23)..(23): n is a, c, g, or t
  modified_base (44)..(44): DNP phosphoramidite base
  misc_feature (44)..(44): n is a, c, g, or t
  modified_base (65)..(65): DNP phosphoramidite base
  misc_feature (65)..(65): n is a, c, g, or t
  modified_base (86)..(86): DNP phosphoramidite base
  misc_feature (86)..(86): n is a, c, g, or t
tnccaaaaatatgttcatttatnagaataataggaagatgtcanacaacttgagaactgtccccnagaggcagattccttggtaant

SEQ ID NO: 1198 - DNA, 87 bp, Artificial Sequence
  Synthetic Probe
  modified_base (2)..(2): DNP phosphoramidite base
  misc_feature (2)..(2): n is a, c, g, or t
  modified_base (23)..(23): DNP phosphoramidite base
  misc_feature (23)..(23): n is a, c, g, or t
  modified_base (44)..(44): DNP phosphoramidite base
  misc_feature (44)..(44): n is a, c, g, or t
  modified_base (65)..(65): DNP phosphoramidite base
  misc_feature (65)..(65): n is a, c, g, or t
  modified_base (86)..(86): DNP phosphoramidite base
  misc_feature (86)..(86): n is a, c, g, or t
tnctgtgcaataaaattgtgttnatcaagagaaaatgagagtcnagaacagaagcactaatttgngaaggaaatagtatgaataant

SEQ ID NO: 1199 - DNA, 87 bp, Artificial Sequence
  Synthetic Probe
  modified_base (2)..(2): DNP phosphoramidite base
  misc_feature (2)..(2): n is a, c, g, or t
  modified_base (23)..(23): DNP phosphoramidite base
  misc_feature (23)..(23): n is a, c, g, or t
  modified_base (44)..(44): DNP phosphoramidite base
  misc_feature (44)..(44): n is a, c, g, or t
  modified_base (65)..(65): DNP phosphoramidite base
  misc_feature (65)..(65): n is a, c, g, or t
  modified_base (86)..(86): DNP phosphoramidite base
  misc_feature (86)..(86): n is a, c, g, or t
tngcagttagaaggttggggagngactacagaaagggagacagnattgggatgataattaggttnggtgttggatgaaatgaaatnt

SEQ ID NO: 1200 - DNA, 87 bp, Artificial Sequence
  Synthetic Probe
  modified_base (2)..(2): DNP phosphoramidite base
  misc_feature (2)..(2): n is a, c, g, or t
  modified_base (23)..(23): DNP phosphoramidite base
  misc_feature (23)..(23): n is a, c, g, or t
  modified_base (44)..(44): DNP phosphoramidite base
  misc_feature (44)..(44): n is a, c, g, or t
  modified_base (65)..(65): DNP phosphoramidite base
  misc_feature (65)..(65): n is a, c, g, or t
  modified_base (86)..(86): DNP phosphoramidite base
  misc_feature (86)..(86): n is a, c, g, or t
tnatattcttactgaattatacntaaatttagtaaaaatacaanaaaataattccagtgcttcantttgtctgtgcattttataant

SEQ ID NO: 1201 - DNA, 87 bp, Artificial Sequence
  Synthetic Probe
  modified_base (2)..(2): DNP phosphoramidite base
  misc_feature (2)..(2): n is a, c, g, or t
  modified_base (23)..(23): DNP phosphoramidite base
  misc_feature (23)..(23): n is a, c, g, or t
  modified_base (44)..(44): DNP phosphoramidite base
  misc_feature (44)..(44): n is a, c, g, or t
  modified_base (65)..(65): DNP phosphoramidite base
  misc_feature (65)..(65): n is a, c, g, or t
  modified_base (86)..(86): DNP phosphoramidite base
  misc_feature (86)..(86): n is a, c, g, or t
tnctgtcaaatgagtggaagacnctaatggaataaccagttttnatgtgttctgatgtaacaaanatgcctctgcctaattagtgnt

SEQ ID NO: 1202 - DNA, 87 bp, Artificial Sequence
  Synthetic Probe
  modified_base (2)..(2): DNP phosphoramidite base
  misc_feature (2)..(2): n is a, c, g, or t
  modified_base (23)..(23): DNP phosphoramidite base
  misc_feature (23)..(23): n is a, c, g, or t
  modified_base (44)..(44): DNP phosphoramidite base
  misc_feature (44)..(44): n is a, c, g, or t
  modified_base (65)..(65): DNP phosphoramidite base
  misc_feature (65)..(65): n is a, c, g, or t
  modified_base (86)..(86): DNP phosphoramidite base
  misc_feature (86)..(86): n is a, c, g, or t
tntctcaaacagaggtggaaatnatgttaatgtatgcatgcctntttctaataatacccccattnggcactggtcagggcttgtcnt

SEQ ID NO: 1203 - DNA, 87 bp, Artificial Sequence
  Synthetic Probe
  modified_base (2)..(2): DNP phosphoramidite base
  misc_feature (2)..(2): n is a, c, g, or t
  modified_base (23)..(23): DNP phosphoramidite base
  misc_feature (23)..(23): n is a, c, g, or t
  modified_base (44)..(44): DNP phosphoramidite base
  misc_feature (44)..(44): n is a, c, g, or t
  modified_base (65)..(65): DNP phosphoramidite base
  misc_feature (65)..(65): n is a, c, g, or t
  modified_base (86)..(86): DNP phosphoramidite base
  misc_feature (86)..(86): n is a, c, g, or t
tncaggaaaagaatgaccatctntttgtagaatgtttatacatnttttgcatatttcaatttccnacttaaattttttaaagcttnt

SEQ ID NO: 1204 - DNA, 87 bp, Artificial Sequence
  Synthetic Probe
  modified_base (2)..(2): DNP phosphoramidite base
  misc_feature (2)..(2): n is a, c, g, or t
  modified_base (23)..(23): DNP phosphoramidite base
  misc_feature (23)..(23): n is a, c, g, or t
  modified_base (44)..(44): DNP phosphoramidite base
  misc_feature (44)..(44): n is a, c, g, or t
  modified_base (65)..(65): DNP phosphoramidite base
  misc_feature (65)..(65): n is a, c, g, or t
  modified_base (86)..(86): DNP phosphoramidite base
  misc_feature (86)..(86): n is a, c, g, or t
tntactgcctatgctttttaccnttaggcttacagaattaaatnaaaaattagccattccagaanatatattttggactgttgtgnt

SEQ ID NO: 1205 - DNA, 87 bp, Artificial Sequence
  Synthetic Probe
  modified_base (2)..(2): DNP phosphoramidite base
  misc_feature (2)..(2): n is a, c, g, or t
  modified_base (23)..(23): DNP phosphoramidite base
  misc_feature (23)..(23): n is a, c, g, or t
  modified_base (44)..(44): DNP phosphoramidite base
  misc_feature (44)..(44): n is a, c, g, or t
  modified_base (65)..(65): DNP phosphoramidite base
  misc_feature (65)..(65): n is a, c, g, or t
  modified_base (86)..(86): DNP phosphoramidite base
  misc_feature (86)..(86): n is a, c, g, or t
tnctcattattttgaatcaaagntcctccgtttattaacagcanatacccacatcctcttcatangcctattaacaacagaggtant

SEQ ID NO: 1206 - DNA, 87 bp, Artificial Sequence
  Synthetic Probe
  modified_base (2)..(2): DNP phosphoramidite base
  misc_feature (2)..(2): n is a, c, g, or t
  modified_base (23)..(23): DNP phosphoramidite base
  misc_feature (23)..(23): n is a, c, g, or t
  modified_base (44)..(44): DNP phosphoramidite base
  misc_feature (44)..(44): n is a, c, g, or t
  modified_base (65)..(65): DNP phosphoramidite base
  misc_feature (65)..(65): n is a, c, g, or t
  modified_base (86)..(86): DNP phosphoramidite base
  misc_feature (86)..(86): n is a, c, g, or t
tngtcagaatttataaagtgggnaatctcatctgaactttatancctgatttttagaagcaaatntagcttctaccaaattagctnt

SEQ ID NO: 1207 - DNA, 87 bp, Artificial Sequence
  Synthetic Probe
  modified_base (2)..(2): DNP phosphoramidite base
  misc_feature (2)..(2): n is a, c, g, or t
  modified_base (23)..(23): DNP phosphoramidite base
  misc_feature (23)..(23): n is a, c, g, or t
  modified_base (44)..(44): DNP phosphoramidite base
  misc_feature (44)..(44): n is a, c, g, or t
  modified_base (65)..(65): DNP phosphoramidite base
  misc_feature (65)..(65): n is a, c, g, or t
  modified_base (86)..(86): DNP phosphoramidite base
  misc_feature (86)..(86): n is a, c, g, or t
tnaattagcatgccatattcacnacttagaacaactgattagtnaaagtcacttgactaaaaacnagaatttctttataaaccacnt

SEQ ID NO: 1208 - DNA, 87 bp, Artificial Sequence
  Synthetic Probe
  modified_base (2)..(2): DNP phosphoramidite base
  misc_feature (2)..(2): n is a, c, g, or t
  modified_base (23)..(23): DNP phosphoramidite base
  misc_feature (23)..(23): n is a, c, g, or t
  modified_base (44)..(44): DNP phosphoramidite base
  misc_feature (44)..(44): n is a, c, g, or t
  modified_base (65)..(65): DNP phosphoramidite base
  misc_feature (65)..(65): n is a, c, g, or t
  modified_base (86)..(86): DNP phosphoramidite base
  misc_feature (86)..(86): n is a, c, g, or t
tncacagactattcaagaaaaancaaaatggtaaatttaatagnttcagacatcttagacaagancttgacttttgggcttcagcnt

SEQ ID NO: 1209 - DNA, 87 bp, Artificial Sequence
  Synthetic Probe
  modified_base (2)..(2): DNP phosphoramidite base
  misc_feature (2)..(2): n is a, c, g, or t
  modified_base (23)..(23): DNP phosphoramidite base
  misc_feature (23)..(23): n is a, c, g, or t
  modified_base (44)..(44): DNP phosphoramidite base
  misc_feature (44)..(44): n is a, c, g, or t
  modified_base (65)..(65): DNP phosphoramidite base
  misc_feature (65)..(65): n is a, c, g, or t
  modified_base (86)..(86): DNP phosphoramidite base
  misc_feature (86)..(86): n is a, c, g, or t
tnaacttttttaaaagaattttntgctttctttctctctaaatntttccttccgtgctttgatgncgggctcgtttctcacgttcnt

SEQ ID NO: 1210 - DNA, 87 bp, Artificial Sequence
  Synthetic Probe
  modified_base (2)..(2): DNP phosphoramidite base
  misc_feature (2)..(2): n is a, c, g, or t
  modified_base (23)..(23): DNP phosphoramidite base
  misc_feature (23)..(23): n is a, c, g, or t
  modified_base (44)..(44): DNP phosphoramidite base
  misc_feature (44)..(44): n is a, c, g, or t
  modified_base (65)..(65): DNP phosphoramidite base
  misc_feature (65)..(65): n is a, c, g, or t
  modified_base (86)..(86): DNP phosphoramidite base
  misc_feature (86)..(86): n is a, c, g, or t
tnacaaaaatatttccttgttanttcaatactatcaaaatatgncataaatcaattacatcaaangcttcaaacatgccagtcccnt

SEQ ID NO: 1211 - DNA, 87 bp, Artificial Sequence
  Synthetic Probe
  modified_base (2)..(2): DNP phosphoramidite base
  misc_feature (2)..(2): n is a, c, g, or t
  modified_base (23)..(23): DNP phosphoramidite base
  misc_feature (23)..(23): n is a, c, g, or t
  modified_base (44)..(44): DNP phosphoramidite base
  misc_feature (44)..(44): n is a, c, g, or t
  modified_base (65)..(65): DNP phosphoramidite base
  misc_feature (65)..(65): n is a, c, g, or t
  modified_base (86)..(86): DNP phosphoramidite base
  misc_feature (86)..(86): n is a, c, g, or t
tnctaggtcttaaatgtgaatangcaaagatttaaaagctgtangcaacagaagaagcaacagtnggaaaataagcaaggaacacnt

SEQ ID NO: 1212 - DNA, 87 bp, Artificial Sequence
  Synthetic Probe
  modified_base (2)..(2): DNP phosphoramidite base
  misc_feature (2)..(2): n is a, c, g, or t
  modified_base (23)..(23): DNP phosphoramidite base
  misc_feature (23)..(23): n is a, c, g, or t
  modified_base (44)..(44): DNP phosphoramidite base
  misc_feature (44)..(44): n is a, c, g, or t
  modified_base (65)..(65): DNP phosphoramidite base
  misc_feature (65)..(65): n is a, c, g, or t
  modified_base (86)..(86): DNP phosphoramidite base
  misc_feature (86)..(86): n is a, c, g, or t
tnctgaaaaggcctgatgtgatntaaaaaaaaaaaaaaaaagtncttgaggaaaattagccaggnaagcaatacttgattggactnt

SEQ ID NO: 1213 - DNA, 87 bp, Artificial Sequence
  Synthetic Probe
  modified_base (2)..(2): DNP phosphoramidite base
  misc_feature (2)..(2): n is a, c, g, or t
  modified_base (23)..(23): DNP phosphoramidite base
  misc_feature (23)..(23): n is a, c, g, or t
  modified_base (44)..(44): DNP phosphoramidite base
  misc_feature (44)..(44): n is a, c, g, or t
  modified_base (65)..(65): DNP phosphoramidite base
  misc_feature (65)..(65): n is a, c, g, or t
  modified_base (86)..(86): DNP phosphoramidite base
  misc_feature (86)..(86): n is a, c, g, or t
tnttcggttcctctgccctgtcntctctctggagccacagcaantgggagttggatagcaccctntggcccaggaaaccataaacnt

SEQ ID NO: 1214 - DNA, 87 bp, Artificial Sequence
  Synthetic Probe
  modified_base (2)..(2): DNP phosphoramidite base
  misc_feature (2)..(2): n is a, c, g, or t
  modified_base (23)..(23): DNP phosphoramidite base
  misc_feature (23)..(23): n is a, c, g, or t
  modified_base (44)..(44): DNP phosphoramidite base
  misc_feature (44)..(44): n is a, c, g, or t
  modified_base (65)..(65): DNP phosphoramidite base
  misc_feature (65)..(65): n is a, c, g, or t
  modified_base (86)..(86): DNP phosphoramidite base
  misc_feature (86)..(86): n is a, c, g, or t
tnttttatttaggtgccaaggtnataacccactgcttgaacttngtgcctgccaataaagcaaanaagttatttgccttaaagaant

SEQ ID NO: 1215 - DNA, 87 bp, Artificial Sequence
  Synthetic Probe
  modified_base (2)..(2): DNP phosphoramidite base
  misc_feature (2)..(2): n is a, c, g, or t
  modified_base (23)..(23): DNP phosphoramidite base
  misc_feature (23)..(23): n is a, c, g, or t
  modified_base (44)..(44): DNP phosphoramidite base
  misc_feature (44)..(44): n is a, c, g, or t
  modified_base (65)..(65): DNP phosphoramidite base
  misc_feature (65)..(65): n is a, c, g, or t
  modified_base (86)..(86): DNP phosphoramidite base
  misc_feature (86)..(86): n is a, c, g, or t
tnaacatttaatacattttcacntttcctaatttacctcaaaangggttagtccaaataaaaatntagtagaaaataaaacataant

SEQ ID NO: 1216 - DNA, 87 bp, Artificial Sequence
  Synthetic Probe
  modified_base (2)..(2): DNP phosphoramidite base
  misc_feature (2)..(2): n is a, c, g, or t
  modified_base (23)..(23): DNP phosphoramidite base
  misc_feature (23)..(23): n is a, c, g, or t
  modified_base (44)..(44): DNP phosphoramidite base
  misc_feature (44)..(44): n is a, c, g, or t
  modified_base (65)..(65): DNP phosphoramidite base
  misc_feature (65)..(65): n is a, c, g, or t
  modified_base (86)..(86): DNP phosphoramidite base
  misc_feature (86)..(86): n is a, c, g, or t
tntgagatgctttggcaatttcntcttttctgtgttggacttanaaccccattaaaagaacctanccgaatgagttatgagttaant

SEQ ID NO: 1217 - DNA, 87 bp, Artificial Sequence
  Synthetic Probe
  modified_base (2)..(2): DNP phosphoramidite base
  misc_feature (2)..(2): n is a, c, g, or t
  modified_base (23)..(23): DNP phosphoramidite base
  misc_feature (23)..(23): n is a, c, g, or t
  modified_base (44)..(44): DNP phosphoramidite base
  misc_feature (44)..(44): n is a, c, g, or t
  modified_base (65)..(65): DNP phosphoramidite base
  misc_feature (65)..(65): n is a, c, g, or t
  modified_base (86)..(86): DNP phosphoramidite base
  misc_feature (86)..(86): n is a, c, g, or t
tntcataggaatgggatgtctgnggctggttttaccagataaangctaccttcattcatatcctnccttcattaaagtccaaaggnt

SEQ ID NO: 1218 - DNA, 87 bp, Artificial Sequence
  Synthetic Probe
  modified_base (2)..(2): DNP phosphoramidite base
  misc_feature (2)..(2): n is a, c, g, or t
  modified_base (23)..(23): DNP phosphoramidite base
  misc_feature (23)..(23): n is a, c, g, or t
  modified_base (44)..(44): DNP phosphoramidite base
  misc_feature (44)..(44): n is a, c, g, or t
  modified_base (65)..(65): DNP phosphoramidite base
  misc_feature (65)..(65): n is a, c, g, or t
  modified_base (86)..(86): DNP phosphoramidite base
  misc_feature (86)..(86): n is a, c, g, or t
tnggggcctcttcttttattagnacatatctctaatattatctncatatggtacaaatttttttnttaaaagatattgggcagggnt

SEQ ID NO: 1219 - DNA, 87 bp, Artificial Sequence
  Synthetic Probe
  modified_base (2)..(2): DNP phosphoramidite base
  misc_feature (2)..(2): n is a, c, g, or t
  modified_base (23)..(23): DNP phosphoramidite base
  misc_feature (23)..(23): n is a, c, g, or t
  modified_base (44)..(44): DNP phosphoramidite base
  misc_feature (44)..(44): n is a, c, g, or t
  modified_base (65)..(65): DNP phosphoramidite base
  misc_feature (65)..(65): n is a, c, g, or t
  modified_base (86)..(86): DNP phosphoramidite base
  misc_feature (86)..(86): n is a, c, g, or t
tnttattgaaaacaagtcaaccntcaaagagccttcttttctantaagtttctcagtgccaggangcgtcagttgagagaatatant

SEQ ID NO: 1220 - DNA, 87 bp, Artificial Sequence
  Synthetic Probe
  modified_base (2)..(2): DNP phosphoramidite base
  misc_feature (2)..(2): n is a, c, g, or t
  modified_base (23)..(23): DNP phosphoramidite base
  misc_feature (23)..(23): n is a, c, g, or t
  modified_base (44)..(44): DNP phosphoramidite base
  misc_feature (44)..(44): n is a, c, g, or t
  modified_base (65)..(65): DNP phosphoramidite base
  misc_feature (65)..(65): n is a, c, g, or t
  modified_base (86)..(86): DNP phosphoramidite base
  misc_feature (86)..(86): n is a, c, g, or t
tnaaataggactgtgttccaggngtaagagtatacacttctctnttacagccaagaattaacatntacagagtagcccttgaaacnt

SEQ ID NO: 1221 - DNA, 87 bp, Artificial Sequence
  Synthetic Probe
  modified_base (2)..(2): DNP phosphoramidite base
  misc_feature (2)..(2): n is a, c, g, or t
  modified_base (23)..(23): DNP phosphoramidite base
  misc_feature (23)..(23): n is a, c, g, or t
  modified_base (44)..(44): DNP phosphoramidite base
  misc_feature (44)..(44): n is a, c, g, or t
  modified_base (65)..(65): DNP phosphoramidite base
  misc_feature (65)..(65): n is a, c, g, or t
  modified_base (86)..(86): DNP phosphoramidite base
  misc_feature (86)..(86): n is a, c, g, or t
tntttttaaaagagacaaaaagnatacacttgcaaaattataantcaatctttcaacatttgccnttgtttctgtatttcaaacant

SEQ ID NO: 1222 - DNA, 87 bp, Artificial Sequence
  Synthetic Probe
  modified_base (2)..(2): DNP phosphoramidite base
  misc_feature (2)..(2): n is a, c, g, or t
  modified_base (23)..(23): DNP phosphoramidite base
  misc_feature (23)..(23): n is a, c, g, or t
  modified_base (44)..(44): DNP phosphoramidite base
  misc_feature (44)..(44): n is a, c, g, or t
  modified_base (65)..(65): DNP phosphoramidite base
  misc_feature (65)..(65): n is a, c, g, or t
  modified_base (86)..(86): DNP phosphoramidite base
  misc_feature (86)..(86): n is a, c, g, or t
tnttatctcaaatggatagttanatactttagttacaatcatangctaactattgtgccagaatntatataatttctcccttaatnt

SEQ ID NO: 1223 - DNA, 87 bp, Artificial Sequence
  Synthetic Probe
  modified_base (2)..(2): DNP phosphoramidite base
  misc_feature (2)..(2): n is a, c, g, or t
  modified_base (23)..(23): DNP phosphoramidite base
  misc_feature (23)..(23): n is a, c, g, or t
  modified_base (44)..(44): DNP phosphoramidite base
  misc_feature (44)..(44): n is a, c, g, or t
  modified_base (65)..(65): DNP phosphoramidite base
  misc_feature (65)..(65): n is a, c, g, or t
  modified_base (86)..(86): DNP phosphoramidite base
  misc_feature (86)..(86): n is a, c, g, or t
tntccttagtagtatgtcacaanaacactggaaacaccagatgntatatgaagtttgaaaaaatntatggtcactttcagcttctnt

SEQ ID NO: 1224 - DNA, 87 bp, Artificial Sequence
  Synthetic Probe
  modified_base (2)..(2): DNP phosphoramidite base
  misc_feature (2)..(2): n is a, c, g, or t
  modified_base (23)..(23): DNP phosphoramidite base
  misc_feature (23)..(23): n is a, c, g, or t
  modified_base (44)..(44): DNP phosphoramidite base
  misc_feature (44)..(44): n is a, c, g, or t
  modified_base (65)..(65): DNP phosphoramidite base
  misc_feature (65)..(65): n is a, c, g, or t
  modified_base (86)..(86): DNP phosphoramidite base
  misc_feature (86)..(86): n is a, c, g, or t
tnttccagcaggaatttgaactntgttacaaaactacattcctntgatgaaaatccctttataangccatttctgattacagatant

SEQ ID NO: 1225 - DNA, 87 bp, Artificial Sequence
  Synthetic Probe
  modified_base (2)..(2): DNP phosphoramidite base
  misc_feature (2)..(2): n is a, c, g, or t
  modified_base (23)..(23): DNP phosphoramidite base
  misc_feature (23)..(23): n is a, c, g, or t
  modified_base (44)..(44): DNP phosphoramidite base
  misc_feature (44)..(44): n is a, c, g, or t
  modified_base (65)..(65): DNP phosphoramidite base
  misc_feature (65)..(65): n is a, c, g, or t
  modified_base (86)..(86): DNP phosphoramidite base
  misc_feature (86)..(86): n is a, c, g, or t
tnatatagccaaatacaaatccnttcaaatactcgctctggtangtattcaatcaaatccagctnggagataaactgcagcaaaant

SEQ ID NO: 1226 - DNA, 87 bp, Artificial Sequence
  Synthetic Probe
  modified_base (2)..(2): DNP phosphoramidite base
  misc_feature (2)..(2): n is a, c, g, or t
  modified_base (23)..(23): DNP phosphoramidite base
  misc_feature (23)..(23): n is a, c, g, or t
  modified_base (44)..(44): DNP phosphoramidite base
  misc_feature (44)..(44): n is a, c, g, or t
  modified_base (65)..(65): DNP phosphoramidite base
  misc_feature (65)..(65): n is a, c, g, or t
  modified_base (86)..(86): DNP phosphoramidite base
  misc_feature (86)..(86): n is a, c, g, or t
tnagtggcagcagtaaacacaanatatacatgtcacaataacgntacagtaattcaacagtaggnaaagatctcgtgtggttgggnt

SEQ ID NO: 1227 - DNA, 87 bp, Artificial Sequence
  Synthetic Probe
  modified_base (2)..(2): DNP phosphoramidite base
  misc_feature (2)..(2): n is a, c, g, or t
  modified_base (23)..(23): DNP phosphoramidite base
  misc_feature (23)..(23): n is a, c, g, or t
  modified_base (44)..(44): DNP phosphoramidite base
  misc_feature (44)..(44): n is a, c, g, or t
  modified_base (65)..(65): DNP phosphoramidite base
  misc_feature (65)..(65): n is a, c, g, or t
  modified_base (86)..(86): DNP phosphoramidite base
  misc_feature (86)..(86): n is a, c, g, or t
tntgacatctattatgactgaanattcctttaatgggaaattanaagttttttattctacagtgnactcacatgcaaaatatcctnt

SEQ ID NO: 1228 - DNA, 87 bp, Artificial Sequence
  Synthetic Probe
  modified_base (2)..(2): DNP phosphoramidite base
  misc_feature (2)..(2): n is a, c, g, or t
  modified_base (23)..(23): DNP phosphoramidite base
  misc_feature (23)..(23): n is a, c, g, or t
  modified_base (44)..(44): DNP phosphoramidite base
  misc_feature (44)..(44): n is a, c, g, or t
  modified_base (65)..(65): DNP phosphoramidite base
  misc_feature (65)..(65): n is a, c, g, or t
  modified_base (86)..(86): DNP phosphoramidite base
  misc_feature (86)..(86): n is a, c, g, or t
tntaacatattattttctttcantggcattgctttaccaaaaangtaaaatcacagaaatcaatnaatttggtactgtatgcccant

SEQ ID NO: 1229 - DNA, 87 bp, Artificial Sequence
  Synthetic Probe
  modified_base (2)..(2): DNP phosphoramidite base
  misc_feature (2)..(2): n is a, c, g, or t
  modified_base (23)..(23): DNP phosphoramidite base
  misc_feature (23)..(23): n is a, c, g, or t
  modified_base (44)..(44): DNP phosphoramidite base
  misc_feature (44)..(44): n is a, c, g, or t
  modified_base (65)..(65): DNP phosphoramidite base
  misc_feature (65)..(65): n is a, c, g, or t
  modified_base (86)..(86): DNP phosphoramidite base
  misc_feature (86)..(86): n is a, c, g, or t
tnatttggcaagtttattttatnaagaaatatgaggaaatcatnatcatgaggatgatttgtgtngtggggagagttacgaaatgnt

SEQ ID NO: 1230 - DNA, 87 bp, Artificial Sequence
  Synthetic Probe
  modified_base (2)..(2): DNP phosphoramidite base
  misc_feature (2)..(2): n is a, c, g, or t
  modified_base (23)..(23): DNP phosphoramidite base
  misc_feature (23)..(23): n is a, c, g, or t
  modified_base (44)..(44): DNP phosphoramidite base
  misc_feature (44)..(44): n is a, c, g, or t
  modified_base (65)..(65): DNP phosphoramidite base
  misc_feature (65)..(65): n is a, c, g, or t
  modified_base (86)..(86): DNP phosphoramidite base
  misc_feature (86)..(86): n is a, c, g, or t
tngtcatgagaaacacttttttnttttatcttagagattctacnattgcattgactgggattccnagtagcaattttcataactcnt

SEQ ID NO: 1231 - protein, 6 aa, Artificial Sequence
  Synthetic Probe
HHHHHH

1. A system for in situ hybridization comprising:
a control probe specific to a control region of chromosome 3, wherein the control probe is labeled with at least one first label, and wherein the control probe is configured to achieve least two enumerable signals per cell with a staining intensity of ≧2 and staining coverage of ≧50% of the number of total nuclei of a control sample within 3 hours of hybridization;
wherein each enumerable signal has a generally round shape,
wherein a round shape is a simple closed curve that fits within a first region, the first region lies on and outside of an inner circle and on and inside of a concentric outer circle, the inner circle having an inner radius (Rᵢₙ) and the outer circle having an outer radius (Rₒᵤₜ),
wherein the simple close curve has a radius Rₛᵢₘₚₗₑ,
wherein Rᵢₙ≦Rₛᵢₘₚₗₑ≦Rₒᵤₜ, and
wherein, Rᵢₙ is ≧50% of Rₒᵤₜ,
wherein a “simple closed curve” as used herein is a connected curve that does not cross itself and ends at the same point where it begins.

2. The system of claim 1, wherein the control probe is a first plurality of single-stranded oligonucleotide probes, each probe comprising:
a sequence selected from the group consisting of SEQ ID NOs: 1-18; or
a sequence selected from the group consisting of a truncated version of SEQ ID NOs: 1-18, the truncated version being at least 40 contiguous basepairs (bp) of said SEQ ID NOs:1-18; or
a sequence selected from the group consisting of a sequence that has at least 70% sequence identity to one of SEQ ID NOs: 1-18.

3. The system of claim 1, wherein the control probe is a first plurality of single-stranded oligonucleotide probes, each probe comprising:
a sequence selected from the group consisting of SEQ ID NOs: 1-18; or
a sequence selected from the group consisting of a truncated version of SEQ ID NOs: 1-18, the truncated version being at least 40 contiguous bp of said SEQ ID NOs:1-18; or
a sequence selected from the group consisting of a sequence that has at least 80% sequence identity to one of SEQ ID NOs: 1-18.

4. The system of claim 1, wherein the control probe is a first plurality of single-stranded oligonucleotide probes, each probe comprising:
a sequence selected from the group consisting of SEQ ID NOs: 1-18; or
a sequence selected from the group consisting of a truncated version of SEQ ID NOs: 1-18, the truncated version being at least 40 contiguous bp of said SEQ ID NOs:1-18; or
a sequence selected from the group consisting of a sequence that has at least 90% sequence identity to one of SEQ ID NOs: 1-18.

5. The system of claim 2, wherein the first plurality of single-stranded oligonucleotide probes is configured to hybridize uniquely and specifically to a portion of the control region human chromosome 3 so that other chromosomes or portions thereof are not evidently labeled.

6. The system of claim 2, wherein the first plurality of single-stranded oligonucleotide probes is configured to hybridize uniquely and specifically to a portion the control region human chromosome 3 so that other chromosomes or portions thereof are not evidently labeled without the influence of blocking DNA.

7. The system of claim 2, wherein the control probes each comprise between 50 to 100 nucleotides.

8. The system of claim 1, further comprising a target probe specific to a target region of human chromosome 3, wherein the target probe is labeled with at least one second label.

9. The system of claim 2, wherein the target probe is specific to a target region near or around the PIK3CA gene locus.

10. A slide comprising a plurality of nuclei chromogenically stained for a chromosome, wherein more than 50% of the nuclei have enumerable signals for said chromosome, each enumerable signal being a generally round shape,
wherein a round shape is a simple closed curve that fits within a first region, wherein the first region lies on and outside of an inner circle and on and inside of a concentric outer circle, the inner circle having an inner radius (Rᵢₙ) and the outer circle having an outer radius (Rₒᵤₜ),
wherein the simple close curve has a radius Rₛᵢₘₚₗₑ,
wherein Rᵢₙ≦Rₛᵢₘₚₗₑ≦Rₒᵤₜ, and
wherein, Rᵢₙ is ≧50% of Rₒᵤₜ,
wherein a “simple closed curve” as used herein is a connected curve that does not cross itself and ends at the same point where it begins.

11. The slide of claim 10, wherein the chromosome is human chromosome 3.

12. The slide of claim 10, wherein more than 60% of the nuclei have enumerable chromosome signals.

13. The slide claim 10, wherein more than 70% of the nuclei have enumerable chromosome signals.

14. A method for in situ hybridization comprising:
contacting a tissue sample with a control probe specific to a control region of a chromosome, wherein the control probe is a single-stranded oligonucleotide probe labeled with at least one first label, and wherein the control probe is configured to achieve at least two signals per cell with a staining intensity of ≧2 and staining coverage of ≧50% of the number of total nuclei of a control sample within 3 hours of hybridization;
hybridizing the control probe to the control region under conditions for a period of time less than about 3 hours;
rinsing the sample to remove unbound probe; and
detecting the presence of the hybridized probe.

15. The method of claim 14, wherein the method is for bright-field in situ hybridization.

16. The method of claim 14, wherein the control probe is hybridized to the control region under conditions for a period of time less than about 2 hours.

17. The method of claim 14, wherein the chromosome is human chromosome 3.

18. The method of claim 14, further comprising contacting the tissue sample with a target probe specific to a control region of the chromosome, the target probe is a single-stranded oligonucleotide probe labeled with at least one second label.

19. The method of claim 18, wherein the target probe is specific to a target region near or around the PIK3CA gene locus of chromosome 3.

20. The method of claim 18, wherein the target probe is specific to a region between nucleotides 178,640,071 and 179,399,807 of human chromosome 3.

21. The method of claim 14, further comprising applying chromogenic detection reagents that recognize the first label and amplify the signal associated with said first label.

22. The method of claim 14, wherein the tissue sample is a formalin-fixed paraffin-embedded (FFPE) tissue sample.

23. A method for in situ hybridization of a tissue sample, the method comprising contacting the tissue sample with a system according to any of claim 1.
